(19) United States
(12) Patent Application Publication
(10) Pub. No.: US 2005/0132444 A1
(43) Pub. Date: Jun. 16, 2005

(54) Cloning of cytochrome p450 genes from Nicotiana

(75) Inventor: Dongmei Xu, (US)

Correspondence Address: FITCH EVEN TABIN AND FLANNERY, 120 SOUTH LA SALLE STREET, SUITE 1600, CHICAGO, IL, 60603-3406, US

(73) Assignee: U.S. Smokeless Tobacco Company

(21) Appl. No.: 10/943,507

(22) Filed: Sep. 17, 2004

Related U.S. Application Data
(63) Continuation-in-part of application No. 10/686,947, filed on Oct. 16, 2003.
(60) Provisional application No. 60/418,933, filed on Oct. 16, 2002.
(60) Provisional application No. 60/485,368, filed on Jul. 8, 2003.
(60) Provisional application No. 60/503,989, filed on Sep. 18, 2003.

(51) Int. Cl. A01H 1/00; C12N 15/82; C12N 5/04; C07H 21/04; C12N 9/06

(52) U.S. Cl. 800/286; 435/419; 435/468; 536/23.6; 435/191

(57) ABSTRACT

The present invention relates to p450 enzymes and nucleic acid sequences encoding p450 enzymes in Nicotiana, and methods of using those enzymes and nucleic acid sequences to alter plant phenotypes.

[0001] The present invention relates to nucleic acid sequences encoding cytochrome p450 enzymes (hereinafter referred to as p450 and p450 enzymes) in Nicotiana plants and methods for using those nucleic acid sequences to alter plant phenotypes.

### BACKGROUND

[0002] Cytochrome p450s catalyze enzymatic reactions for a diverse range of chemically dissimilar substrates that include the oxidative, peroxidative and reductive metabolism of endogenous and xenobiotic substrates. In plants, p450s participate in biochemical pathways that include the synthesis of plant products such as phenylpropanoids, alkaloids, terpenoids, lipids, cyanogenic glycosides, and glucosinolates (Chappel, Annu. Rev. Plant Physiol. Plant Mol. Biol. 198, 49:311-343). Cytochrome p450s, also known as p450 heme-thiolate proteins, usually act as terminal oxidases in multi-component electron transfer chains, called p450-containing monooxygenase systems. Specific reactions catalyzed include demethylation, hydroxylation, epoxidation, N-oxidation, sulfooxidation, N-, S-, and O-dealkylations, desulfation, deamination, and reduction of azo, nitro, and N-oxide groups.

[0003] The diverse role of Nicotiana plant p450 enzymes has been implicated in effecting a variety of plant metabolites such as phenylpropanoids, alkaloids, terpenoids, lipids, cyanogenic glycosides, glucosinolates and a host of other chemical entities. During recent years, it is becoming apparent that some p450 enzymes can impact the composition of plant metabolites in plants. For example, it has been long desired to improve the flavor and aroma of certain plants by altering its profile of selected fatty acids through breeding; however very little is known about mechanisms involved in controlling the levels of these leaf constituents. The down regulation of p450 enzymes associated with the modification of fatty acids may facilitate accumulation of desired fatty acids that provide more preferred leaf phenotypic qualities. The function of p450 enzymes and their broadening roles in plant constituents is still being discovered. For instance, a special class of p450 enzymes was found to catalyze the breakdown of fatty acid into volatile C6- and C9-aldehydes and -alcohols that are major contributors of “fresh green” odor of fruits and vegetables. The level of other novel targeted p450s may be altered to enhance the qualities of leaf constituents by modifying lipid composition and related break down metabolites in Nicotiana leaf. Several of these constituents in leaf are affected by senescence that stimulates the maturation of leaf quality properties. Still other reports have shown that p450s enzymes are play a functional role in altering fatty acids that are involved in plant-pathogen interactions and disease resistance.

[0004] In other instances, p450 enzymes have been suggested to be involved in alkaloid biosynthesis. Nornicotine is a minor alkaloid found in Nicotiana tabaceum. It has been postulated that it is produced by the p450 mediated demethylation of nicotine followed by acylation and nitrosation at the N position thereby producing a series of N-acylnonicotines and N-nitrosonornicotines. N-demethylation, catalyzed by a putative p450 demethylase, is thought to be a primary source of nornicotine biosyntheses in Nicotiana. While the enzyme is believed to be microsomal, thus far a nicotine demethylase enzyme has not been successfully purified, nor have the genes involved been isolated.

[0005] Furthermore, it is hypothesized but not proven that the activity of p450 enzymes is genetically controlled and also strongly influenced by environment factors. For example, the demethylation of nicotine in Nicotiana is thought to increase substantially when the plants reach a mature stage. Furthermore, it is hypothesized yet not proven that the demethylase gene contains a transposable element that can inhibit translation of RNA when present.

[0006] The large multiplicity of p450 enzyme forms, their differing structure and function have made their research on Nicotiana p450 enzymes very difficult before the enclosed invention. In addition, cloning of p450 enzymes has been hampered at least in part because these membrane-localized proteins are typically present in low abundance and often unstable to purification. Hence, a need exists for the identification of p450 enzymes in plants and the nucleic acid sequences associated with those p450 enzymes. In particular, only a few cytochrome p450 proteins have been reported in Nicotiana. The inventions described herein entail the discovery of a substantial number of cytochrome p450 fragments that correspond to several groups of p450 species based on their sequence identity.

### SUMMARY

[0007] The present invention is directed to plant p450 enzymes. The present invention is further directed to plant p450 enzymes from Nicotiana. The present invention is also directed to p450 enzymes in plants whose expression is induced by ethylene and/or plant senescence. The present invention is yet further directed to nucleic acid sequences in plants having enzymatic activities, for example, being categorized as oxygenase, demethylase and the like, or other and the use of those sequences to reduce or silence the expression or over-expression of these enzymes. The invention also relates to p450 enzymes found in plants containing higher nornicotine levels than plants exhibiting lower nornicotine levels.

[0008] In one aspect, the invention is directed to nucleic acid sequences as set forth in SEQ. ID. Nos. 1, 3, 5, 7, 9, 11, 13, 15, 17, 19, 21, 23, 25, 27, 29, 31, 33, 35, 37, 39, 41, 43, 45, 47, 49, 51, 53, 55, 57, 59, 61, 63, 65, 67, 69, 71, 73, 75, 77, 79, 81, 83, 85, 87, 89, 91, 95, 97, 99, 101, 103, 105, 107, 109, 111, 113, 115, 117, 119, 121, 123, 125, 127, 129, 131, 133, 135, 137, 139, 143, 145, 147, 149, 151, 153, 155, 157, 159, 161, 163, 165, 167, 169, 171, 173, 175, 177, 179, 181, 183, 185, 187, 189, 191, 193, 195, 197, 199, 201, 203, 205, 207, 209, 211, 213, 215, 217, 219, 221, 223, 225, 227, 229, 231, 233, 235, 237, 239, 241, 243, 245, 247, 249, 251, 253, 255, 257, 259, 261, 263, 265, 267, 269, 271, 273, 275, 277, 279, 281, 283, 285, 287, 289, 291, 293, 295, 356, 358, 360, 362, 364, 366, 368, 370, 372, 434, 435, 437, 439, 441, 443, 445, 447, 449, 451, 453, 455, 457, 459, 461, 463, 465, 467, 469, 471, 473, 475, 477, 479, 481, 483, 485, 487, 489, 491, 493, 495, 497, 499, 501, 502, 503, 505, 507, 509, 511, 513, 515, 517, 519, 521, 523, 525, 527, 529, 531, 533 and 535.

[0009] In a second related aspect, those fragments containing greater than 75% identity in nucleic acid sequence were placed into groups dependent upon their identity in a region corresponding to the first nucleic acid following the cytochrome p450 motif GXRXCX(G/A) to the stop codon. The representative nucleic acid groups and respective species are shown in Table I.

[0010] In a third aspect, the invention is directed to amino acid sequences as set forth in SEQ. ID. Nos. 2, 4, 6, 8, 10, 12, 14, 16, 18, 20, 22, 24, 26, 28, 30, 32, 34, 36, 38, 40, 42, 44, 46, 48, 50, 52, 54, 56, 58, 60, 62, 64, 66, 68, 70, 72, 74, 76, 78, 80, 82, 84, 86, 88, 90, 92, 96, 98, 100, 102, 104, 106, 108, 110, 112, 114, 116, 118, 120, 122, 124, 126, 128, 130, 132, 134, 136, 138, 140, 144, 146, 148, 150, 152, 154, 156, 158, 160, 162, 164, 166, 168, 170, 172, 174, 176, 178, 180, 182, 184, 186, 188, 190, 192, 194, 196, 198, 200, 202, 204, 206, 208, 210, 212, 214, 216, 218, 220, 222, 224, 226, 228, 230, 232, 234, 236, 238, 240, 242, 244, 246, 248, 250, 252, 254, 256, 258, 260, 262, 264, 266, 268, 270, 272, 274, 276, 278, 280, 282, 284, 286, 288, 290, 292, 294, 296, 297-355, 357, 359, 361, 363, 365, 367, 369, 371, 373, 436, 438, 440, 442, 444, 446, 448, 450, 452, 454, 456, 458, 460, 462, 464, 466, 468, 470, 472, 474, 476, 478, 480, 482, 484, 486, 488, 490, 492, 494, 496, 498, 500, 502, 504, 506, 508, 510, 512, 514, 516, 518, 520, 522, 524, 526, 528, 530, 532, 534 and 536.

[0011] In a fourth related aspect, those fragments containing greater than 71% identity in amino acid sequence were placed into groups dependent upon their identity to each other in a region corresponding to the first amino acid following the cytochrome p450 motif GXRXCX(G/A) to the stop codon. The representative amino acid groups and respective species are shown in Table II.

[0012] In a fifth aspect, the invention is directed to amino acid sequences of full length genes as set forth in SEQ. ID. Nos. 150, 152, 154, 156, 158, 160, 162, 164, 166, 168, 170, 172, 174, 176, 178, 180, 182, 184, 186, 188, 190, 192, 194, 196, 198, 200, 202, 204, 206, 208, 210, 212, 214, 216, 218, 220, 222, 224, 226, 228, 230, 232, 234, 236, 238, 240, 242, 244, 246, 248, 250, 252, 254, 256, 258, 260, 262, 264, 266, 268, 270, 272, 274, 276, 278, 280, 282, 284, 286, 288, 290, 292, 294, 296, 298, 300, 302, 304, 306, 308, 310, 312 and 314.

[0013] In a sixth related aspect, those full length genes containing 85% or greater identity in amino acid sequence were placed into groups dependent upon the identity to each other. The representative amino acid groups and respective species are shown in Table III.

[0014] In a seventh aspect, the invention is directed to amino acid sequences of the fragments set forth in SEQ. ID. Nos. 297-355.

[0015] In the eighth related aspect, those fragments containing 90% or greater identity in amino acid sequence were placed into groups dependent upon their identity to each other in a region corresponding to the first cytochrome p450 domain, UXXRXXZ, to the third cytochrome domain, GXRXO, where U is E or K, X is any amino acid and Z is R, T, S or M. The representative amino acid groups respective species shown in Table IV.

[0016] In a ninth related aspect, the reduction or elimination or over-expression of p450 enzymes in Nicotiana plants may be accomplished transiently using RNA viral systems.

[0017] Resulting transformed or infected plants are assessed for phenotypic changes including, but not limited to, analysis of endogenous p450 RNA transcripts, p450 expressed peptides, and concentrations of plant metabolites using techniques commonly available to one having ordinary skill in the art.

[0018] In a tenth important aspect, the present invention is also directed to generation of trangenic Nicotiana lines that have altered p450 enzyme activity levels. In accordance with the invention, these transgenic lines include nucleic acid sequences that are effective for reducing or silencing or increasing the expression of certain enzyme thus resulting in phenotypic effects within Nicotiana. Such nucleic acid sequences include SEQ. ID. Nos. 1, 3, 5, 7, 9, 11, 13, 15, 17, 19, 21, 23, 25, 27, 29, 31, 33, 35, 37, 39, 41, 43, 45, 47, 49, 51, 53, 55, 57, 59, 61, 63, 65, 67, 69, 71, 73, 75, 77, 79, 81, 83, 85, 87, 89, 91, 95, 97, 99, 101, 103, 105, 107, 109, 111, 113, 115, 117, 119, 121, 123, 125, 127, 129, 131, 133, 135, 137, 139, 143, 145, 147, 149, 151, 153, 155, 157, 159, 161, 163, 165, 167, 169, 171, 173, 175, 177, 179, 181, 183, 185, 187, 189, 191, 193, 195, 197, 199, 201, 203, 205, 207, 209, 211, 213, 215, 217, 219, 221, 223, 225, 227, 229, 231, 233, 235, 237, 239, 241, 243, 245, 247, 249, 251, 253, 255, 257, 259, 261, 263, 265, 267, 269, 271, 273, 275, 277, 279, 281, 283, 285, 287, 289, 291, 293, 295, 297, 299, 301, 303, 305, 307, 309, 311 and 313.

[0019] In a very important eleventh aspect of the invention, plant cultivars including nucleic acids of the present invention in a down regulation capacity using either full length genes or fragments thereof or in an over-expression capacity using full length genes will have altered metabolite profiles relative to control plants.

[0020] In a twelfth aspect of the invention, plant cultivars including nucleic acid of the present invention using either full length genes or fragments thereof in modifying the biosynthesis or breakdown of metabolites derived from the plant or external to the plants, will have use in tolerating certain exogenous chemicals or plant pests. Such nucleic acid sequences include SEQ ID. Nos. 1, 3, 5, 7, 9, 11, 13, 15, 17, 19, 21, 23, 25, 27, 29, 31, 33, 35, 37, 39, 41, 43, 45, 47, 49, 51, 53, 55, 57, 59, 61, 63, 65, 67, 69, 71, 73, 75, 77, 79, 81, 83, 85, 87, 89, 91, 95, 97, 99, 101, 103, 105, 107, 109, 111, 113, 115, 117, 119, 121, 123, 125, 127, 129, 131, 133, 135, 137, 139, 143, 145, 147, 149, 151, 153, 155, 157, 159, 161, 163, 165, 167, 169, 171, 173, 175, 177, 179, 181, 183, 185, 187, 189, 191, 193, 195, 197, 199, 201, 203, 205, 207, 209, 211, 213, 215, 217, 219, 221, 223, 225, 227, 229, 231, 233, 235, 237, 239, 241, 243, 245, 247, 249, 251, 253, 255, 257, 259, 261, 263, 265, 267, 269, 271, 273, 275, 277, 279, 281, 283, 285, 287, 289, 291, 293, 295, 356, 358, 360, 362, 364, 366, 368, 370, 372, 434, 435, 437, 439, 441, 443, 445, 447, 449, 451, 453, 455, 457, 459, 461, 463, 465, 467, 469, 471, 473, 475, 477, 479, 481, 483, 485, 487, 489, 491, 493, 495, 497, 499, 501, 502, 503, 505, 507, 509, 511, 513, 515, 517, 519, 521, 523, 525, 527, 529, 531, 533 and 535.

[0021] In a thirteenth aspect, the present invention is directed to the screening of plants, more preferably Nicotiana, that contain genes that have substantial nucleic acid identity to the taught nucleic acid sequence. The use of the invention would be advantageous to identify and select plants that contain a nucleic acid sequence with exact or substantial identity where such plants are part of a breeding program for traditional or transgenic varieties, a mutagenesis program, or naturally occurring diverse plant populations. The screening of plants for substantial nucleic acid identity may be accomplished by evaluating plant nucleic acid materials using a nucleic acid probe in conjunction with nucleic acid detection protocols including, but not limited to, nucleic acid hybridization and PCR analysis. The nucleic acid probe may consist of the taught nucleic acid sequence or fragment thereof corresponding to SEQ ID 1, 3, 5, 7, 9, 11, 13, 15, 17, 19, 21, 23, 25, 27, 29, 31, 33, 35, 37, 39, 41, 43, 45, 47, 49, 51, 53, 55, 57, 59, 61, 63, 65, 67, 69, 71, 73, 75, 77, 79, 81, 83, 85, 87, 89, 91, 95, 97, 99, 101, 103, 105, 107, 109, 111, 113, 115, 117, 119, 121, 123, 125, 127, 129, 131, 133, 135, 137, 139, 143, 145, 147, 149, 151, 153, 155, 157, 159, 161, 163, 165, 167, 169, 171, 173, 175, 177, 179, 181, 183, 185, 187, 189, 191, 193, 195, 197, 199, 201, 203, 205, 207, 209, 211, 213, 215, 217, 219, 221, 223, 225, 227, 229, 231, 233, 235, 237, 239, 241, 243, 245, 247, 249, 251, 253, 255, 257, 259, 261, 263, 265, 267, 269, 271, 273, 275, 277, 279, 281, 283, 285, 287, 289, 291, 293, 295, 356, 358, 360, 362, 364, 366, 368, 370, 372, 434, 435, 437, 439, 441, 443, 445, 447, 449, 451, 453, 455, 457, 459, 461, 463, 465, 467, 469, 471, 473, 475, 477, 479, 481, 483, 485, 487, 489, 491, 493, 495, 497, 499, 501, 502, 503, 505, 507, 509, 511, 513, 515, 517, 519, 521, 523, 525, 527, 529, 531, 533 and 535.

[0022] In a fourteenth aspect, the present invention is directed to the identification of plant genes, more preferably Nicotiana, that share substantial amino acid identity corresponding to the taught nucleic acid sequence. The identification of plant genes including both cDNA and genomic clones, those cDNAs and genomic clones, more preferably from Nicotiana may be accomplished by screening plant cDNA libraries using a nucleic acid probe in conjunction with nucleic acid detection protocols including, but not limited to, nucleic acid hybridization and PCR analysis. The nucleic acid probe may be comprised of nucleic acid sequence or fragment thereof corresponding to SEQ ID 1, 3, 5, 7, 9, 11, 13, 15, 17, 19, 21, 23, 25, 27, 29, 31, 33, 35, 37, 39, 41, 43, 45, 47, 49, 51, 53, 55, 57, 59, 61, 63, 65, 67, 69, 71, 73, 75, 77, 79, 81, 83, 85, 87, 89, 91, 95, 97, 99, 101, 103, 105, 107, 109, 111, 113, 115, 117, 119, 121, 123, 125, 127, 129, 131, 133, 135, 137, 139, 143, 145 and 147.

[0023] In an alterative fifteenth aspect, cDNA expression libraries that express peptides may be screened using antibodies directed to part or all of the taught amino acid sequence. Such amino acid sequences include SEQ ID 2, 4, 8, 9, 10, 12, 14, 16, 18, 20, 22, 24, 26, 28, 30, 32, 34, 36, 38, 40, 42, 44, 46, 48, 50, 52, 54, 56, 58, 60, 62, 64, 66, 68, 70, 72, 74, 76, 78, 80, 82, 84, 86, 88, 90, 92, 96, 98, 100, 102, 104, 106, 108, 110, 112, 114, 116, 118, 120, 122, 124, 126, 128, 130, 132, 134, 136, 138, 140, 144, 146, 148.

[0024] In a sixteenth important aspect, the present invention is also directed to generation of transgenic Nicotiana lines that have over-expression of p450 enzyme activity levels. In accordance with the invention, these transgenic lines include all nucleic acid sequences encoding the amino acid sequences of full length genes that are effective for increasing the expression of certain enzyme thus resulting in phenotypic effects within Nicotiana. Such amino acid sequences include SEQ. ID. 150, 152, 154, 156, 158, 160, 162, 164, 166, 168, 170, 172, 174, 176, 178, 180, 182, 184, 186, 188, 190, 192, 194, 196, 198, 200, 202, 204, 206, 208, 210, 212, 214, 216, 218, 220, 222, 224, 226, 228, 230, 232, 234, 236, 238, 240, 242, 244, 246, 248, 250, 252, 254, 256, 258, 260, 262, 264, 266, 268, 270, 272, 274, 276, 278, 280, 282, 284, 286, 288, 290, 292, 294, 296, 298, 300, 302, 304, 306, 308, 310, 312, and 314.

### BRIEF DESCRIPTION OF DRAWINGS

[0025] FIG. 1 shows nucleic acid SEQ. ID. No.:1 and amino acid SEQ. ID. No.:2.

[0026] FIG. 2 shows nucleic acid SEQ. ID. No.:3 and amino acid SEQ. ID. No.:4.

[0027] FIG. 3 shows nucleic acid SEQ. ID. No.:5 and amino acid SEQ. ID. No.:6.

[0028] FIG. 4 shows nucleic acid SEQ. ID. No.:7 and amino acid SEQ. ID. No.:8.

[0029] FIG. 5 shows nucleic acid SEQ. ID. No.:9 and amino acid SEQ. ID. No.:10.

[0030] FIG. 6 shows nucleic acid SEQ. ID. No.:11 and amino acid SEQ. ID. No.:12.

[0031] FIG. 7 shows nucleic acid SEQ. ID. No.:13 and amino acid SEQ. ID. No.:14.

[0032] FIG. 8 shows nucleic acid SEQ. ID. No.:15 and amino acid SEQ. ID. No.:16.

[0033] FIG. 9 shows nucleic acid SEQ. ID. No.:17 and amino acid SEQ. ID. No.:18.

[0034] FIG. 10 shows nucleic acid SEQ. ID. No.:19 and amino acid SEQ. ID. No.:20.

[0035] FIG. 11 shows nucleic acid SEQ. ID. No.:21 and amino acid SEQ. ID. No.:22.

[0036] FIG. 12 shows nucleic acid SEQ. ID. No.:23 and amino acid SEQ. ID. No.:24.

[0037] FIG. 13 shows nucleic acid SEQ. ID. No.:25 and amino acid SEQ. ID. No.:26.

[0038] FIG. 14 shows nucleic acid SEQ. ID. No.:27 and amino acid SEQ. ID. No.:28.

[0039] FIG. 15 shows nucleic acid SEQ. ID. No.:29 and amino acid SEQ. ID. No.:30.

[0040] FIG. 16 shows nucleic acid SEQ. ID. No.:31 and amino acid SEQ. ID. No.:32.

[0041] FIG. 17 shows nucleic acid SEQ. ID. No.:33 and amino acid SEQ. ID. No.:34.

[0042] FIG. 18 shows nucleic acid SEQ. ID. No.:35 and amino acid SEQ. ID. No.:36.

[0043] FIG. 19 shows nucleic acid SEQ. ID. No.:37 and amino acid SEQ. ID. No.:38.

[0044] FIG. 20 shows nucleic acid SEQ. ID. No.:39 and amino acid SEQ. ID. No.:40.

[0045] FIG. 21 shows nucleic acid SEQ. ID. No.:41 and amino acid SEQ. ID. No.:42.

[0046] FIG. 22 shows nucleic acid SEQ. ID. No.:43 and amino acid SEQ. ID. No.:44.

[0047] FIG. 23 shows nucleic acid SEQ. ID. No.:45 and amino acid SEQ. ID. No.:46.

[0048] FIG. 24 shows nucleic acid SEQ. ID. No.:47 and amino acid SEQ. ID. No.:48.

[0049] FIG. 25 shows nucleic acid SEQ. ID. No.:49 and amino acid SEQ. ID. No.:50.

[0050] FIG. 26 shows nucleic acid SEQ. ID. No.:51 and amino acid SEQ. ID. No.:52.

[0051] FIG. 27 shows nucleic acid SEQ. ID. No.:53 and amino acid SEQ. ID. No.:54.

[0052] FIG. 28 shows nucleic acid SEQ. ID. No.:55 and amino acid SEQ. ID. No.:56.

[0053] FIG. 29 shows nucleic acid SEQ. ID. No.:57 and amino acid SEQ. ID. No.:58.

[0054] FIG. 30 shows nucleic acid SEQ. ID. No.:59 and amino acid SEQ. ID. No.:60.

[0055] FIG. 31 shows nucleic acid SEQ. ID. No.:61 and amino acid SEQ. ID. No.:62.

[0056] FIG. 32 shows nucleic acid SEQ. ID. No.:63 and amino acid SEQ. ID. No.:64.

[0057] FIG. 33 shows nucleic acid SEQ. ID. No.:65 and amino acid SEQ. ID. No.:66.

[0058] FIG. 34 shows nucleic acid SEQ. ID. No.:67 and amino acid SEQ. ID. No.:68.

[0059] FIG. 35 shows nucleic acid SEQ. ID. No.:69 and amino acid SEQ. ID. No.:70.

[0060] FIG. 36 shows nucleic acid SEQ. ID. No.:71 and amino acid SEQ. ID. No.:72.

[0061] FIG. 37 shows nucleic acid SEQ. ID. No.:73 and amino acid SEQ. ID. No.:74.

[0062] FIG. 38 shows nucleic acid SEQ. ID. No.:75 and amino acid SEQ. ID. No.:76.

[0063] FIG. 39 shows nucleic acid SEQ. ID. No.:77 and amino acid SEQ. ID. No.:78.

[0064] FIG. 40 shows nucleic acid SEQ. ID. No.:79 and amino acid SEQ. ID. No.:80.

[0065] FIG. 41 shows nucleic acid SEQ. ID. No.:81 and amino acid SEQ. ID. No.:82.

[0066] FIG. 42 shows nucleic acid SEQ. ID. No.:83 and amino acid SEQ. ID. No.:84.

[0067] FIG. 43 shows nucleic acid SEQ. ID. No.:85 and amino acid SEQ. ID. No.:86.

[0068] FIG. 44 shows nucleic acid SEQ. ID. No.:87 and amino acid SEQ. ID. No.:88.

[0069] FIG. 45 shows nucleic acid SEQ. ID. No.:89 and amino acid SEQ. ID. No.:90.

[0070] FIG. 46 shows nucleic acid SEQ. ID. No.:91 and amino acid SEQ. ID. No.:92.

[0071] FIG. 48 shows nucleic acid SEQ. ID. No.:95 and amino acid SEQ. ID. No.:96.

[0072] FIG. 49 shows nucleic acid SEQ. ID. No.:97 and amino acid SEQ. ID. No.:98.

[0073] FIG. 50 shows nucleic acid SEQ. ID. No.:99 and amino acid SEQ. ID. No.:100.

[0074] FIG. 51 shows nucleic acid SEQ. ID. No.:101 and amino acid SEQ. ID. No.:102.

[0075] FIG. 52 shows nucleic acid SEQ. ID. No.:103 and amino acid SEQ. ID. No.:104.

[0076] FIG. 53 shows nucleic acid SEQ. ID. No.:105 and amino acid SEQ. ID. No.:106.

[0077] FIG. 54 shows nucleic acid SEQ. ID. No.:107 and amino acid SEQ. ID. No.:108.

[0078] FIG. 55 shows nucleic acid SEQ. ID. No.:109 and amino acid SEQ. ID. No.:110.

[0079] FIG. 56 shows nucleic acid SEQ. ID. No.:111 and amino acid SEQ. ID. No.:112.

[0080] FIG. 57 shows nucleic acid SEQ. ID. No.:113 and amino acid SEQ. ID. No.:114.

[0081] FIG. 58 shows nucleic acid SEQ. ID. No.:115 and amino acid SEQ. ID. No.:116.

[0082] FIG. 59 shows nucleic acid SEQ. ID. No.:117 and amino acid SEQ. ID. No.:118.

[0083] FIG. 60 shows nucleic acid SEQ. ID. No.:119 and amino acid SEQ. ID. No.:120.

[0084] FIG. 61 shows nucleic acid SEQ. ID. No.:121 and amino acid SEQ. ID. No.:122.

[0085] FIG. 62 shows nucleic acid SEQ. ID. No.:123 and amino acid SEQ. ID. No.:124.

[0086] FIG. 63 shows nucleic acid SEQ. ID. No.:125 and amino acid SEQ. ID. No.:126.

[0087] FIG. 64 shows nucleic acid SEQ. ID. No.:127 and amino acid SEQ. ID. No.:128.

[0088] FIG. 65 shows nucleic acid SEQ. ID. No.:129 and amino acid SEQ. ID. No.:130.

[0089] FIG. 66 shows nucleic acid SEQ. ID. No.:131 and amino acid SEQ. ID. No.:132.

[0090] FIG. 67 shows nucleic acid SEQ. ID. No.:133 and amino acid SEQ. ID. No.:134.

[0091] FIG. 68 shows nucleic acid SEQ. ID. No.:135 and amino acid SEQ. ID. No.:136.

[0092] FIG. 69 shows nucleic acid SEQ. ID. No.:137 and amino acid SEQ. ID. No.:138.

[0093] FIG. 70 shows nucleic acid SEQ. ID. No.:139 and amino acid SEQ. ID. No.:140.

[0094] FIG. 72 shows nucleic acid SEQ. ID. No.:143 and amino acid SEQ. ID. No.:144.

[0095] FIG. 73 shows nucleic acid SEQ. ID. No.:145 and amino acid SEQ. ID. No.:146.

[0096] FIG. 74 shows nucleic acid SEQ. ID. No.:147 and amino acid SEQ. ID. No.:148.

[0097] FIG. 75 shows nucleic acid SEQ. ID No.: 149 and amino acid SEQ. ID. No.: 150.

[0098] FIG. 76 shows nucleic acid SEQ. ID No.: 151 and amino acid SEQ. ID. No.: 152.

[0099] FIG. 77 shows nucleic acid SEQ. ID No.: 153 and amino acid SEQ. ID. No.: 154.

[0100] FIG. 78 shows nucleic acid SEQ. ID No.: 155 and amino acid SEQ. ID. No.: 156.

[0101] FIG. 79 shows nucleic acid SEQ. ID No.: 157 and amino acid SEQ. ID. No.: 158.

[0102] FIG. 80 shows nucleic acid SEQ. ID No.: 159 and amino acid SEQ. ID. No.: 160.

[0103] FIG. 81 shows nucleic acid SEQ. ID No.: 161 and amino acid SEQ. ID. No.: 162.

[0104] FIG. 82 shows nucleic acid SEQ. ID No.: 163 and amino acid SEQ. ID. No.: 164.

[0105] FIG. 83 shows nucleic acid SEQ. ID No.: 165 and amino acid SEQ. ID. No.: 166.

[0106] FIG. 84 shows nucleic acid SEQ. ID No.: 167 and amino acid SEQ. ID. No.: 168.

[0107] FIG. 85 shows nucleic acid SEQ. ID No.: 169 and amino acid SEQ. ID. No.: 170.

[0108] FIG. 86 shows nucleic acid SEQ. ID No.: 171 and amino acid SEQ. ID. No.: 172.

[0109] FIG. 87 shows nucleic acid SEQ. ID No.: 173 and amino acid SEQ. ID. No.: 174.

[0110] FIG. 88 shows nucleic acid SEQ. ID No.: 175 and amino acid SEQ. ID. No.: 176.

[0111] FIG. 89 shows nucleic acid SEQ. ID No.: 177 and amino acid SEQ. ID. No.: 178.

[0112] FIG. 90 shows nucleic acid SEQ. ID No.: 179 and amino acid SEQ. ID. No.: 180.

[0113] FIG. 91 shows nucleic acid SEQ. ID No.: 181 and amino acid SEQ. ID. No.: 182.

[0114] FIG. 92 shows nucleic acid SEQ. ID No.: 183 and amino acid SEQ. ID. No.: 184.

[0115] FIG. 93 shows nucleic acid SEQ. ID No.: 185 and amino acid SEQ. ID. No.: 186.

[0116] FIG. 94 shows nucleic acid SEQ. ID No.: 187 and amino acid SEQ. ID. No.: 188.

[0117] FIG. 95 shows nucleic acid SEQ. ID No.: 189 and amino acid SEQ. ID. No.: 190.

[0118] FIG. 96 shows nucleic acid SEQ. ID No.: 191 and amino acid SEQ. ID. No.: 192.

[0119] FIG. 97 shows nucleic acid SEQ. ID No.: 193 and amino acid SEQ. ID. No.: 194.

[0120] FIG. 98 shows nucleic acid SEQ. ID No.: 195 and amino acid SEQ. ID. No.: 196.

[0121] FIG. 99 shows nucleic acid SEQ. ID No.: 197 and amino acid SEQ. ID. No.: 198.

[0122] FIG. 100 shows nucleic acid SEQ. ID No.: 199 and amino acid SEQ. ID. No.: 200.

[0123] FIG. 101 shows nucleic acid SEQ. ID No.: 201 and amino acid SEQ. ID. No.: 202.

[0124] FIG. 102 shows nucleic acid SEQ. ID No.: 203 and amino acid SEQ. ID. No.: 204.

[0125] FIG. 103 shows nucleic acid SEQ. ID No.: 205 and amino acid SEQ. ID. No.: 206.

[0126] FIG. 104 shows nucleic acid SEQ. ID No.: 207 and amino acid SEQ. ID. No.: 208.

[0127] FIG. 105 shows nucleic acid SEQ. ID No.: 209 and amino acid SEQ. ID. No.: 210.

[0128] FIG. 106 shows nucleic acid SEQ. ID No.: 211 and amino acid SEQ. ID. No.: 212.

[0129] FIG. 107 shows nucleic acid SEQ. ID No.: 213 and amino acid SEQ. ID. No.: 214.

[0130] FIG. 108 shows nucleic acid SEQ. ID No.: 215 and amino acid SEQ. ID. No.: 216.

[0131] FIG. 109 shows nucleic acid SEQ. ID No.: 217 and amino acid SEQ. ID. No.: 218.

[0132] FIG. 110 shows nucleic acid SEQ. ID No.: 219 and amino acid SEQ. ID. No.: 220.

[0133] FIG. 111 shows nucleic acid SEQ. ID No.: 221 and amino acid SEQ. ID. No.: 222.

[0134] FIG. 112 shows nucleic acid SEQ. ID No.: 223 and amino acid SEQ. ID. No.: 224.

[0135] FIG. 113 shows nucleic acid SEQ. ID No.: 225 and amino acid SEQ. ID. No.: 226.

[0136] FIG. 114 shows nucleic acid SEQ. ID No.: 227 and amino acid SEQ. ID. No.: 228.

[0137] FIG. 115 shows nucleic acid SEQ. ID No.: 229 and amino acid SEQ. ID. No.: 230.

[0138] FIG. 116 shows nucleic acid SEQ. ID No.: 231 and amino acid SEQ. ID. No.: 232.

[0139] FIG. 117 shows nucleic acid SEQ. ID No.: 233 and amino acid SEQ. ID. No.: 234.

[0140] FIG. 118 shows nucleic acid SEQ. ID No.: 235 and amino acid SEQ. ID. No.: 236.

[0141] FIG. 119 shows nucleic acid SEQ. ID No.: 237 and amino acid SEQ. ID. No.: 238.

[0142] FIG. 120 shows nucleic acid SEQ. ID No.: 239 and amino acid SEQ. ID. No.: 240.

[0143] FIG. 121 shows nucleic acid SEQ. ID No.: 241 and amino acid SEQ. ID. No.: 242.

[0144] FIG. 122 shows nucleic acid SEQ. ID No.: 243 and amino acid SEQ. ID. No.: 244.

[0145] FIG. 123 shows nucleic acid SEQ. ID No.: 245 and amino acid SEQ. ID. No.: 246.

[0146] FIG. 124 shows nucleic acid SEQ. ID No.: 247 and amino acid SEQ. ID. No.: 248.

[0147] FIG. 125 shows nucleic acid SEQ. ID No.: 249 and amino acid SEQ. ID. No.: 250.

[0148] FIG. 126 shows nucleic acid SEQ. ID No.: 251 and amino acid SEQ. ID. No.: 252.

[0149] FIG. 127 shows nucleic acid SEQ. ID No.: 253 and amino acid SEQ. ID. No.: 254.

[0150] FIG. 128 shows nucleic acid SEQ. ID No.: 255 and amino acid SEQ. ID. No.: 256.

[0151] FIG. 129 shows nucleic acid SEQ. ID No.: 257 and amino acid SEQ. ID. No.: 258.

[0152] FIG. 130 shows nucleic acid SEQ. ID No.: 259 and amino acid SEQ. ID. No.: 260.

[0153] FIG. 131 shows nucleic acid SEQ. ID No.: 261 and amino acid SEQ. ID. No.: 262.

[0154] FIG. 132 shows nucleic acid SEQ. ID No.: 263 and amino acid SEQ. ID. No.: 264.

[0155] FIG. 133 shows nucleic acid SEQ. ID No.: 265 and amino acid SEQ. ID. No.: 266.

[0156] FIG. 134 shows nucleic acid SEQ. ID No.: 267 and amino acid SEQ. ID. No.: 268.

[0157] FIG. 135 shows nucleic acid SEQ. ID No.: 269 and amino acid SEQ. ID. No.: 270.

[0158] FIG. 136 shows nucleic acid SEQ. ID No.: 271 and amino acid SEQ. ID. No.: 272.

[0159] FIG. 137 shows nucleic acid SEQ. ID No.: 273 and amino acid SEQ. ID. No.: 274.

[0160] FIG. 138 shows nucleic acid SEQ. ID No.: 275 and amino acid SEQ. ID. No.: 276.

[0161] FIG. 139 shows nucleic acid SEQ. ID No.: 277 and amino acid SEQ. ID. No.: 278.

[0162] FIG. 140 shows nucleic acid SEQ. ID No.: 279 and amino acid SEQ. ID. No.: 280.

[0163] FIG. 141 shows nucleic acid SEQ. ID No.: 281 and amino acid SEQ. ID. No.: 282.

[0164] FIG. 142 shows nucleic acid SEQ. ID No.: 283 and amino acid SEQ. ID. No.: 284.

[0165] FIG. 143 shows nucleic acid SEQ. ID No.: 285 and amino acid SEQ. ID. No.: 286.

[0166] FIG. 144 shows nucleic acid SEQ. ID No.: 287 and amino acid SEQ. ID. No.: 288.

[0167] FIG. 145 shows nucleic acid SEQ. ID No.: 289 and amino acid SEQ. ID. No.: 290.

[0168] FIG. 146 shows nucleic acid SEQ. ID No.: 293 and amino acid SEQ. ID. No.: 294.

[0169] FIG. 147 shows nucleic acid SEQ. ID No.: 295 and amino acid SEQ. ID. No.: 296.

[0170] FIG. 148 shows nucleic acid SEQ. ID No.: 297 and amino acid SEQ. ID. No.: 298.

[0171] FIG. 149 shows nucleic acid SEQ. ID No.: 299 and amino acid SEQ. ID. No.: 300

[0172] FIG. 150 shows a comparison of Sequence Groups.

[0173] FIG. 151 illustrates alignment of full length clones.

[0174] FIG. 152 shows a procedure used for cloning of cytochrome p450 cDNA fragments by PCR FIG. 153 shows nucleic acid SEQ. ID No.: 299 and amino acid SEQ. ID. No.: 300.

[0175] FIG. 154 shows nucleic acid SEQ. ID No.: 301 and amino acid SEQ. ID. No.: 302.

[0176] FIG. 155 shows nucleic acid SEQ. ID No.: 303 and amino acid SEQ. ID. No.: 304.

[0177] FIG. 156 shows nucleic acid SEQ. ID No.: 305 and amino acid SEQ. ID. No.: 306.

[0178] FIG. 157 shows nucleic acid SEQ. ID No.: 307 and amino acid SEQ. ID. No.: 308.

[0179] FIG. 158 shows nucleic acid SEQ. ID No.: 309 and amino acid SEQ. ID. No.: 310.

[0180] FIG. 159 shows nucleic acid SEQ. ID No.: 311 and amino acid SEQ. ID. No.: 312.

[0181] FIG. 160 shows nucleic acid SEQ. ID No.: 313 and amino acid SEQ. ID. No.: 314.

[0182] FIG. 161 shows nucleic acid SEQ. ID No.: 315 and amino acid SEQ. ID. No.: 316.

[0183] FIG. 162 shows probe set sequences of all clones on GeneChip.

[0184] FIG. 163 shows SEQ. ID. Nos. 434-536.

### DETAILED DESCRIPTION

Definitions

[0185] Unless defined otherwise, all technical and scientific terms used herein have the same meaning as commonly understood by one of ordinary skill in the art to which this invention belongs. Singleton et al. (1994) Dictionary of Microbiology and Molecular Biology, second edition, John Wiley and Sons (New York) provides one of skill with a general dictionary of many of the terms used in this invention. All patents and publications referred to herein are incorporated by reference herein. For purposes of the present invention, the following terms are defined below.

[0186] “Enzymatic activity” is meant to include demethylation, hydroxylation, epoxidation, N-oxidation, sulfooxidation, N-, S-, and O-dealkylations, desulfation, deamination, and reduction of azo, nitro, and N-oxide groups. The term “nucleic acid” refers to a deoxyribonucleotide or ribonucleotide polymer in either single- or double-stranded form, or sense or anti-sense, and unless otherwise limited, encompasses known analogues of natural nucleotides that hybridize to nucleic acids in a manner similar to naturally occurring nucleotides. Unless otherwise indicated, a particular nucleic acid sequence includes the complementary sequence thereof. The terms “operably linked”, “in operable combination”, and “in operable order” refer to functional linkage between a nucleic acid expression control sequence (such as a promoter, signal sequence, or array of transcription factor binding sites) and a second nucleic acid sequence, wherein the expression control sequence affects transcription and/or translation of the nucleic acid corresponding to the second sequence.

[0187] The term “recombinant” when used with reference to a cell indicates that the cell replicates a heterologous nucleic acid, expresses said nucleic acid or expresses a peptide, heterologous peptide, or protein encoded by a heterologous nucleic acid. Recombinant cells can express genes or gene fragments in either the sense or antisense form that are not found within the native (non-recombinant) form of the cell. Recombinant cells can also express genes that are found in the native form of the cell, but wherein the genes are modified and re-introduced into the cell by artificial means.

[0188] A “structural gene” is that portion of a gene comprising a DNA segment encoding a protein, polypeptide or a portion thereof, and excluding the 5′ sequence which drives the initiation of transcription. The structural gene may alternatively encode a nontranslatable product. The structural gene may be one which is normally found in the cell or one which is not normally found in the cell or cellular location wherein it is introduced, in which case it is termed a “heterologous gene”. A heterologous gene may be derived in whole or in part from any source known to the art, including a bacterial genome or episome, eukaryotic, nuclear or plasmid DNA, cDNA, viral DNA or chemically synthesized DNA. A structural gene may contain one or more modifications that could effect biological activity or its characteristics, the biological activity or the chemical structure of the expression product, the rate of expression or the manner of expression control. Such modifications include, but are not limited to, mutations, insertions, deletions and substitutions of one or more nucleotides. The structural gene may constitute an uninterrupted coding sequence or it may include one or more introns, bounded by the appropriate splice junctions. The structural gene may be translatable or non-translatable, including in an anti-sense orientation. The structural gene may be a composite of segments derived from a plurality of sources and from a plurality of gene sequences (naturally occurring or synthetic, where synthetic refers to DNA that is chemically synthesized).

[0189] “Derived from” is used to mean taken, obtained, received, traced, replicated or descended from a source (chemical and/or biological). A derivative may be produced by chemical or biological manipulation (including, but not limited to, substitution, addition, insertion, deletion, extraction, isolation, mutation and replication) of the original source.

[0190] “Chemically synthesized”, as related to a sequence of DNA, means that portions of the component nucleotides were assembled in vitro. Manual chemical synthesis of DNA may be accomplished using well established procedures (Caruthers, Methodology of DNA and RNA Secuencing, (1983), Weissman (ed.), Praeger Publishers, New York, Chapter 1); automated chemical synthesis can be performed using one of a number of commercially available machines.

[0191] Optimal alignment of sequences for comparison may be conducted by the local homology algorithm of Smith and Waterman, Adv. Appl. Math. 2:482 (1981), by the homology alignment algorithm of Needleman and Wunsch, J. Mol. Biol. 48:443 (1970), by the search for similarity method of Pearson and Lipman Proc. Natl. Acad. Sci. (U.S.A.) 85: 2444 (1988), by computerized implementations of these algorithms (GAP, BESTFIT, FASTA, and TFASTA in the Wisconsin Genetics Software Package, Genetics Computer Group, 575 Science Dr., Madison, Wis.), or by inspection.

[0192] The NCBI Basic Local Alignment Search Tool (BLAST) (Altschul et al., 1990) is available from several sources, including the National Center for Biological Information (NCBI, Bethesda, Md.) and on the Internet, for use in connection with the sequence analysis programs blastp, blastn, blastx, tblastn and tblastx. It can be accessed at htp://www.ncbi.nlm.nih.gov/BLAST/. A description of how to determine sequence identity using this program is available at http://www.ncbi.nlm.nih.gov/BLAST/blast help.html.

[0193] The terms “substantial amino acid identity” or “substantial amino acid sequence identity” as applied to amino acid sequences and as used herein denote a characteristic of a polypeptide, wherein the peptide comprises a sequence that has at least 70 percent sequence identity, preferably 80 percent amino acid sequence identity, more preferably 90 percent amino acid sequence identity, and most preferably at least 99 to 100 percent sequence identity as compared to a reference group over region corresponding to the first amino acid following the cytochrome p450 motif GXRXCX(G/A) to the stop codon of the translated peptide.

[0194] The terms “substantial nucleic acid identity” or “substantial nucleic acid sequence identity” as applied to nucleic acid sequences and as used herein denote a characteristic of a polynucleotide sequence, wherein the polynucleotide comprises a sequence that has at least 75 percent sequence identity, preferably 81 percent amino acid sequence identity, more preferably at least 91 percent sequence identity, and most preferably at least 99 to 100 percent sequence identity as compared to a reference group over region corresponding to the first nucleic acid following the cytochrome p450 motif GXRXCX(G/A) to the stop codon of the translated peptide.

[0195] Another indication that nucleotide sequences are substantially identical is if two molecules hybridize to each other under stringent conditions. Stringent conditions are sequence-dependent and will be different in different circumstances. Generally, stringent conditions are selected to be about 5° C. to about 20° C., usually about 10° C. to about 15° C., lower than the thermal melting point (Tm) for the specific sequence at a defined ionic strength and pH. The Tm is the temperature (under defined ionic strength and pH) at which 50% of the target sequence hybridizes to a matched probe. Typically, stringent conditions will be those in which the salt concentration is about 0.02 molar at pH 7 and the temperature is at least about 60° C. For instance in a standard Southern hybridization procedure, stringent conditions will include an initial wash in 6×SSC at 42° C. followed by one or more additional washes in 0.2×SSC at a temperature of at least about 55° C., typically about 60° C. and often about 65° C.

[0196] Nucleotide sequences are also substantially identical for purposes of this invention when the polypeptides and/or proteins which they encode are substantially identical. Thus, where one nucleic acid sequence encodes essentially the same polypeptide as a second nucleic acid sequence, the two nucleic acid sequences are substantially identical, even if they would not hybridize under stringent conditions due to degeneracy permitted by the genetic code (see, Darnell et al. (1990) Molecular Cell Biology, Second Edition Scientific American Books W. H. Freeman and Company New York for an explanation of codon degeneracy and the genetic code). Protein purity or homogeneity can be indicated by a number of means well known in the art, such as polyacrylamide gel electrophoresis of a protein sample, followed by visualization upon staining. For certain purposes high resolution may be needed and HPLC or a similar means for purification may be utilized.

[0197] As used herein, the term “vector” is used in reference to nucleic acid molecules that transfer DNA segment(s) into a cell. A vector may act to replicate DNA and may reproduce independently in a host cell. The term “vehicle” is sometimes used interchangeably with “vector.” The term “expression vector” as used herein refers to a recombinant DNA molecule containing a desired coding sequence and appropriate nucleic acid sequences necessary for the expression of the operably linked coding sequence in a particular host organism. Nucleic acid sequences necessary for expression in prokaryotes usually include a promoter, an operator (optional), and a ribosome binding site, often along with other sequences. Eucaryotic cells are known to utilize promoters, enhancers, and termination and polyadenylation signals.

[0198] For the purpose of regenerating complete genetically engineered plants with roots, a nucleic acid may be inserted into plant cells, for example, by any technique such as in vivo inoculation or by any of the known in vitro tissue culture techniques to produce transformed plant cells that can be regenerated into complete plants. Thus, for example, the insertion into plant cells may be by in vitro inoculation by pathogenic or non-pathogenic A. tumefaciens. Other such tissue culture techniques may also be employed.

[0199] “Plant tissue” includes differentiated and undifferentiated tissues of plants, including, but not limited to, roots, shoots, leaves, pollen, seeds, tumor tissue and various forms of cells in culture, such as single cells, protoplasts, embryos and callus tissue. The plant tissue may be in planta or in organ, tissue or cell culture.

[0200] “Plant cell” as used herein includes plant cells in planta and plant cells and protoplasts in culture. “cDNA” or “complementary DNA” generally refers to a single stranded DNA molecule with a nucleotide sequence that is complementary to an RNA molecule. cDNA is formed by the action of the enzyme reverse transcriptase on an RNA template.

Strategies for Obtaining Nucleic Acid Sequences

[0201] In accordance with the present invention, RNA was extracted from Nicotiana tissue of converter and non-converter Nicotiana lines. The extracted RNA was then used to create cDNA. Nucleic acid sequences of the present invention were then generated using two strategies.

[0202] In the first strategy, the poly A enriched RNA was extracted from plant tissue and cDNA was made by reverse transcription PCR. The single strand cDNA was then used to create p450 specific PCR populations using degenerate primers plus a oligo d(T) reverse primer. The primer design was based on the highly conserved motifs of p450. Examples of specific degenerate primers are set forth in FIG. 1. Sequence fragments from plasmids containing appropriate size inserts were further analyzed. These size inserts typically ranged from about 300 to about 800 nucleotides depending on which primers were used.

[0203] In a second strategy, a cDNA library was initially constructed. The cDNA in the plasmids was used to create p450 specific PCR populations using degenerate primers plus T7 primer on plasmid as reverse primer. As in the first strategy, sequence fragments from plasmids containing appropriate size inserts were further analyzed.

[0204] Nicotiana plant lines known to produce high levels of nornicotine (converter) and plant lines having undetectable levels of nornicotine may be used as starting materials.

[0205] Leaves can then be removed from plants and treated with ethylene to activate p450 enzymatic activities defined herein. Total RNA is extracted using techniques known in the art. cDNA fragments can then be generated using PCR (RT-PCR) with the oligo d(T) primer as described in FIG. 153. The cDNA library can then be constructed more fully described in examples herein.

[0206] The conserved region of p450 type enzymes can be used as a template for degenerate primers (FIG. 75). Using degenerate primers, p450 specific bands can be amplified by PCR. Bands indicative for p450 like enzymes can be identified by DNA sequencing. PCR fragments can be characterized using BLAST search, alignment or other tools to identify appropriate candidates.

[0207] Sequence information from identified fragments can be used to develop PCR primers. These primers in combination of plasmid primers in cDNA library were used to clone full length p450 genes. Large-scale Southern reverse analysis was conducted to examine the differential expression for all fragment clones obtained and in some cases full length clones. In this aspect of the invention, these large-scale reverse Southern assays can be conducted using labeled total cDNA's from different tissues as a probe to hybridize with cloned DNA fragments in order to screen all cloned inserts.

[0208] Nonradioactive and radioactive (p³²) Northern blotting assays were also used to characterize clones p450 fragments and full length clones.

[0209] Peptide specific antibodies were made against several full-length clones by deriving their amino acid sequence and selecting peptide regions that were antigenic and unique relative to other clones. Rabbit antibodies were made to synthetic peptides conjugated to a carrier protein. Western blotting analyses or other immunological methods were performed on plant tissue using these antibodies.

[0210] Nucleic acid sequences identified as described above can be examined by using virus induced gene silencing technology (VIGS, Baulcombe, Current Opinions in Plant Biology, 1999, 2:109-113).

[0211] Peptide specific antibodies were made for several full-length clones by deriving their amino acid sequence and selecting peptide regions that were potentially antigenic and were unique relative to other clones. Rabbit antibodies were made to synthetic petides conjugated to a carrier protein. Western blotting analyses were perfomed using these antibodies.

[0212] In another aspect of the invention, interfering RNA technology (RNAi) is used to further characterize cytochrome p450 enzymatic activities in Nicotiana plants of the present invention. The following references which describe this technology are incorporated by reference herein, Smith et al., Nature, 2000, 407:319-320; Fire et al., Nature, 1998, 391:306-311; Waterhouse et al., PNAS, 1998, 95:13959-13964; Stalberg et al., Plant Molecular Biology, 1993, 23:671-683; Baulcombe, Current Opinions in Plant Biology, 1999, 2:109-113; and Brigneti et al., EMBO Journal, 1998, 17(22):6739-6746. Plants may be transformed using RNAi techniques, antisense techniques, or a variety of other methods described.

[0213] Several techniques exist for introducing foreign genetic material into plant cells, and for obtaining plants that stably maintain and express the introduced gene. Such techniques include acceleration of genetic material coated onto microparticles directly into cells (U.S. Pat. No. 4,945,050 to Cornell and U.S. Pat. No. 5,141,131 to DowElanco). Plants may be transformed using Agrobacterium technology, see U.S. Pat. No. 5,177,010 to University of Toledo, U.S. Pat. No. 5,104,310 to Texas A&M, European Patent Application 0131624B1, European Patent Applications 120516, 159418B1, European Patent Applications 120516, 159418B1 and 176,112 to Schilperoot, U.S. Pat. Nos. 5,149,645, 5,469,976, 5,464,763 and 4,940,838 and 4,693,976 to Schilperoot, European Patent Applications 116718, 290799, 320500 all to MaxPlanck, European Patent Applications 604662 and 627752 to Japan Nicotiana, European Patent Applications 0267159, and 0292435 and U.S. Pat. No. 5,231,019 all to Ciba Geigy, U.S. Pat. Nos. 5,463,174 and 4,762,785 both to Calgene, and U.S. Pat. Nos. 5,004,863 and 5,159,135 both to Agracetus. Other transformation technology includes whiskers technology, see U.S. Pat. Nos. 5,302,523 and 5,464,765 both to Zeneca. Electroporation technology has also been used to transform plants, see WO 87/06614 to Boyce Thompson Institute, U.S. Pat. No. 5,472,869 and U.S. Pat. No. 5,384,253 both to Dekalb, WO9209696 and WO9321335 both to PGS. All of these transformation patents and publications are incorporated by reference. In addition to numerous technologies for transforming plants, the type of tissue which is contacted with the foreign genes may vary as well. Such tissue would include but would not be limited to embryogenic tissue, callus tissue type I and II, hypocotyl, meristem, and the like. Almost all plant tissues may be transformed during dedifferentiation using appropriate techniques within the skill of an artisan.

[0214] Foreign genetic material introduced into a plant may include a selectable marker. The preference for a particular marker is at the discretion of the artisan, but any of the following selectable markers may be used along with any other gene not listed herein which could function as a selectable marker. Such selectable markers include but are not limited to aminoglycoside phosphotransferase gene of transposon Tn5 (Aph II) which encodes resistance to the antibiotics kanamycin, neomycin and G418, as well as those genes which code for resistance or tolerance to glyphosate; hygromycin; methotrexate; phosphinothricin (bar); imidazolinones, sulfonylureas and triazolopyrimidine herbicides, such as chlorosulfuron; bromoxynil, dalapon and the like.

[0215] In addition to a selectable marker, it may be desirous to use a reporter gene. In some instances a reporter gene may be used without a selectable marker. Reporter genes are genes which are typically not present or expressed in the recipient organism or tissue. The reporter gene typically encodes for a protein which provide for some phenotypic change or enzymatic property. Examples of such genes are provided in K. Weising et al. Ann. Rev. Genetics, 22, 421 (1988), which is incorporated herein by reference. Preferred reporter genes include without limitation glucuronidase (GUS) gene and GFP genes.

[0216] Once introduced into the plant tissue, the expression of the structural gene may be assayed by any means known to the art, and expression may be measured as mRNA transcribed, protein synthesized, or the amount of gene silencing that occurs (see U.S. Pat. No. 5,583,021 which is hereby incorporated by reference). Techniques are known for the in vitro culture of plant tissue, and in a number of cases, for regeneration into whole plants (EP Appln No. 88810309.0). Procedures for transferring the introduced expression complex to commercially useful cultivars are known to those skilled in the art.

[0217] Once plant cells expressing the desired level of p450 enzyme are obtained, plant tissues and whole plants can be regenerated therefrom using methods and techniques well-known in the art. The regenerated plants are then reproduced by conventional means and the introduced genes can be transferred to other strains and cultivars by conventional plant breeding techniques.

[0218] The following examples illustrate methods for carrying out the invention and should be understood to be illustrative of, but not limiting upon, the scope of the invention which is defined in the appended claims.

### EXAMPLES

### Example I

### Development of Plant Tissue and Ethylene Treatment

Plant Growth

[0219] Plants were seeded in pots and grown in a greenhouse for 4 weeks. The 4 week old seedlings were transplanted into individual pots and grown in the greenhouse for 2 months. The plants were watered 2 times a day with water containing 150 ppm NPK fertilizer during growth. The expanded green leaves were detached from plants to do the ethylene treatment described below.

[0220] Cell Line 78379

[0221] Tobacco line 78379, which is a burley tobacco line released by the University of Kentucky was used as a source of plant material. One hundred plants were cultured as standard in the art of growing tobacco and transplanted and tagged with a distinctive number (1-100). Fertilization and field management were conducted as recommended.

[0222] Three quarters of the 100 plants converted between 20 and 100% of the nicotine to nornicotine. One quarter of the 100 plants converted less than 5% of the nicotine to nornicotine. Plant number 87 had the least conversion (2%) while plant number 21 had 100% conversion. Plants converting less than 3% were classified as non-converters. Self-pollinated seed of plant number 87 and plant number 21, as well as crossed (21×87 and 87×21) seeds were made to study genetic and phenotypic differences. Plants from selfed 21 were converters, and 99% of selfs from 87 were non-converters. The other 1% of the plants from 87 showed low conversion (5-15%). Plants from reciprocal crosses were all converters.

Cell Line 4407

[0223] Nicotiana line 4407, which is a burley line was used as a source of plant material. Uniform and representative plants (100) were selected and tagged. Of the 100 plants 97 were non-converters and three were converters. Plant number 56 had the least amount of conversion (1.2%) and plant number 58 had the highest level of conversion (96%). Self-pollenated seeds and crossed seeds were made with these two plants.

[0224] Plants from selfed-58 segregated with 3:1 converter to non-converter ratio. Plants 58-33 and 58-25, were identified as homozygous converter and nonconverter plant lines, respectively. The stable conversion of 58-33 was confirmed by analysis of its progenies of next generation.

[0225] Cell Line PBLB01

[0226] PBLB01 is a burley line developed by ProfiGen, Inc. and was used as a source of plant material. The converter plant was selected from foundation seeds of PBLB01.

Ethylene Treatment Procedures

[0227] Green leaves were detached from 2-3 month greenhouse grown plants and sprayed with 0.3% ethylene solution (Prep brand Ethephon (Rhone-Poulenc)). Each sprayed leaf was hung in a curing rack equipped with humidifier and covered with plastic. During the treatment, the sample leaves were periodically sprayed with the ethylene solution. Approximately 24-48 hour post ethylene treatment, leaves were collected for RNA extraction. Another sub-sample was taken for metabolic constituent analysis to determine the concentration of leaf metabolites and more specific constituents of interest such as a variety of alkaloids.

[0228] As an example, alkaloids analysis could be performed as follows. Samples (0.1 g) were shaken at 150 rpm with 0.5 ml 2N NaOH, and a 5 ml extraction solution which contained quinoline as an internal standard and methyl t-butyl ether. Samples were analyzed on a HP 6890 GC equipped with a FID detector. A temperature of 250° C. was used for the detector and injector. An HP column (30 m-0.32 nm-1 m) consisting of fused silica crosslinked with 5% phenol and 95% methyl silicon was used at a temperature gradient of 110-185° C. at 10° C. per minute. The column was operated at 100° C. with a flow rate of 1.7 cm³min⁻¹ with a split ratio of 40:1 with a 2-1 injection volume using helium as the carrier gas.

### Example 2

### RNA Isolation

[0229] For RNA extractions, middle leaves from 2 month old greenhouse grown plants were treated with ethylene as described. The 0 and 24-48 hours samples were used for RNA extraction. In some cases, leaf samples under the senescence process were taken from the plants 10 days post flower-head removal. These samples were also used for extraction. Total RNA was isolated using Rneasy Plant Mini Kit® (Qiagen, Inc., Valencia, Calif.) following manufacturer's protocol.

[0230] The tissue sample was ground under liquid nitrogen to a fine powder using a DEPC treated mortar and pestle. Approximately 100 milligrams of ground tissue were transferred to a sterile 1.5 ml eppendorf tube. This sample tube was placed in liquid nitrogen until all samples were collected. Then, 450 μ-l of Buffer RLT as provided in the kit (with the addition of Mercaptoethanol) was added to each individual tube. The sample was vortexed vigorously and incubated at 56° C. for 3 minutes. The lysate was then, applied to the QIAshredder™ spin column sitting in a 2-ml collection tube, and centrifuged for 2 minutes at maximum speed. The flow through was collected and 0.5 volume of ethanol was added to the cleared lysate. The sample is mixed well and transferred to an Rneasy® mini spin column sitting in a 2 ml collection tube. The sample was centrifuged for 1 minute at 10,000 rpm. Next, 700 μl of buffer RWl was pipetted onto the Rneasy® column and centrifuged for 1 minute at 10,000 rpm. Buffer RPE was pipetted onto the Rneasy® column in a new collection tube and centrifuged for 1 minute at 10,000 rpm. Buffer RPE was again, added to the Rneasy® spin column and centrifuged for 2 minutes at maximum speed to dry the membrane. To eliminate any ethanol carry over, the membrane was placed in a separate collection tube and centrifuged for an additional 1 minute at maximum speed. The Rneasy® column was transferred into a new 1.5 ml collection tube, and 40 μl of Rnase-free water was pipetted directly onto the Rneasy® membrane. This final elute tube was centrifuged for 1 minute at 10,000 rpm. Quality and quantity of total RNA was analyzed by denatured formaldehyde gel and spectrophotometer.

[0231] Poly(A)RNA was isolated using oligotex™ poly A+ RNA purification kit (Qiagen Inc.) following manufacture's protocol. About 200 μg total RNA in 250 μl maximum volume was used. A volume of 250 μl of Buffer OBB and 15 μl of oligotex™ suspension was added to the 250 μl of total RNA. The contents were mixed thoroughly by pipetting and incubated for 3 minutes at 70° C. on a heating block. The sample was then, placed at room temperature for approximately 20 minutes. The oligotex:mRNA complex was pelleted by centrifugation for 2 minutes at maximum speed. All but 50 μl of the supernatant was removed from the microcentrifuge tube. The sample was treated further by OBB buffer. The oligotex:mRNA pellet was resuspended in 400 μl of Buffer OW2 by vortexing. This mix was transferred onto a small spin column placed in a new tube and centrifuged for 1 minute at maximum speed. The spin column was transferred to a new tube and an additional 400 μl of Buffer OW2 was added to the column. The tube was then centrifuged for 1 minute at maximum speed. The spin column was transferred to a final 1.5 ml microcentrifuge tube. The sample was eluted with 60 ul of hot (70° C.) Buffer OEB. Poly A product was analyzed by denatured formaldehyde gels and spectrophotometric analysis.

### Example 3

### Reverse Transcription—PCR

[0232] First strand cDNA was produced using SuperScript reverse transcriptase following manufacturer's protocol (Invitrogen, Carlsbad, Calif.). The poly A+ enriched RNA/oligo dT primer mix consisted of less than 5 μg of total RNA, 1 μl of 10 mM DNTP mix, 1 μl of Oligo d(T)₁₂₋₁₈ (0.5 μg/μl), and up to 10 μl of DEPC-treated water. Each sample was incubated at 65° C. for 5 minutes, then placed on ice for at least 1 minute. A reaction mixture was prepared by adding each of the following components in order: 2 μl 10×RT buffer, 4 μl of 25 mM MgCl2, 2 μl of 0.1 M DTT, and 1 μl of RNase OUT Recombinant RNase Inhibitor. An addition of 9 μl of reaction mixture was pipetted to each RNA/primer mixture and gently mixed. It was incubated at 42° C. for 2 minutes and 1 μl of Super Script II™ RT was added to each tube. The tube was incubated for 50 minutes at 42° C. The reaction was terminated at 70° C. for 15 minutes and chilled on ice. The sample was collected by centrifugation and 1 μl of RNase H was added to each tube and incubated for 20 minutes at 37° C. The second PCR was carried out with 200 μmoles of forward primer (degenerate primers as in FIG. 75, SEQ. ID Nos. 149-156) and 100 μmoles reverse primer (mix of 18 nt oligo d(T) followed by 1 random base).

[0233] Reaction conditions were 94° C. for 2 minutes and then performed 40 cycles of PCR at 94° C. for 1 minute, 45′ to 60° C. for 2 minutes, 72° C. for 3 minutes with a 72° C. extension for an extra 10 min.

[0234] Ten microliters of the amplified sample were analyzed by electrophoresis using a 1% agarose gel. The correct size fragments were purified from agarose gel.

### Example 4

### Generation of PCR Fragment Populations

[0235] PCR fragments from Example 3 were ligated into a pGEM-T® Easy Vector (Promega, Madison, Wis.) following manufacturer's instructions. The ligated product was transformed into JM109 competent cells and plated on LB media plates for blue/white selection. Colonies were selected and grown in a 96 well plate with 1.2 ml of LB media overnight at 37° C. Frozen stock was generated for all selected colonies. Plasmid DNA from plates were purified using Beckman's Biomeck 2000 miniprep robotics with Wizard SV Miniprep® kit (Promega). Plasmid DNA was eluted with 100 μl water and stored in a 96 well plate. Plasmids were digested by EcoR1 and were analyzed using 1% agarose gel to confirm the DNA quantity and size of inserts. The plasmids containing a 400-600 bp insert were sequenced using an CEQ 2000 sequencer (Beckman, Fullerton, Calif.). The sequences were aligned with GenBank database by BLAST search. The p450 related fragments were identified and further analyzed. Alternatively, p450 fragments were isolated from substraction libraries. These fragments were also analyzed as described above.

### Example 5

### Construction of cDNA Library

[0236] A cDNA library was constructed by preparing total RNA from ethylene treated leaves as follows. First, total RNA was extracted from ethylene treated leaves of tobacco line 58-33 using a modified acid phenol and chloroform extraction protocol. Protocol was modified to use one gram of tissue that was ground and subsequently vortexed in 5 ml of extraction buffer (100 mM Tris-HCl, pH 8.5; 200 mM NaCl; 10 mM EDTA; 0.5% SDS) to which 5 ml phenol (pH5.5) and 5 ml chloroform was added. The extracted sample was centrifuged and the supernatant was saved. This extraction step was repeated 2-3 more times until the supernatant appeared clear. Approximately 5 ml of chloroform was added to remove trace amounts of phenol. RNA was precipitated from the combined supernatant fractions by adding a 3-fold volume of ETOH and 1/10 volume of 3M NaOAc (pH5.2) and storing at −20° C. for 1 hour. After transferring to a Corex glass container the RNA fraction was centrifuged at 9,000 RPM for 45 minutes at 4° C. The pellet was washed with 70% ethanol and spun for 5 minutes at 9,000 RPM at 4° C. After drying the pellet, the pelleted RNA was dissolved in 0.5 ml RNase free water. The pelleted RNA was dissolved in 0.5 ml RNase free water. The quality and quantity of total RNA was analyzed by denatured formaldehyde gel and spectrophotometer, respectively.

[0237] The resultant total RNA was isolated for poly A+ RNA using an Oligo(dT) cellulose protocol (Invitrogen) and Microcentrifuge spin columns (Invitrogen) by the following protocol. Approximately twenty mg of total RNA was subjected to twice purification to obtain high quality poly A+ RNA. Poly A+ RNA product was analyzed by performing denatured formaldehyde gel and subsequent RT-PCR of known full-length genes to ensure high quality of mRNA.

[0238] Next, poly A+ RNA was used as template to produce a cDNA library employing cDNA synthesis kit, ZAP-cDNA® synthesis kit, and ZAP-cDNA® Gigapack® III gold cloning kit (Stratagene, La Jolla, Calif.). The method involved following the manufacture's protocol as specified. Approximately 8 μg of poly A+ RNA was used to construct cDNA library. Analysis of the primary library revealed about 2.5×10⁶-1×10⁷ pfu. A quality background test of the library was completed by complementation assays using IPTG and X-gal, where recombinant plaques was expressed at more than 100-fold above the background reaction.

[0239] A more quantitative analysis of the library by random PCR showed that average size of insert cDNA was approximately 1.2 kb. The method used a two-step PCR method as followed. For the first step, reverse primers were designed based on the preliminary sequence information obtained from p450 fragments. The designed reverse primers and T3 (forward) primers were used amplify corresponding genes from the cDNA library. PCR reactions were subjected to agarose electrophoresis and the corresponding bands of high molecular weight were excised, purified, cloned and sequenced. In the second step, new primers designed from 5′UTR or the start coding region of p450 as the forward primers together with the reverse primers (designed from 3′UTR of p450) were used in the subsequent PCR to obtain full-length p450 clones.

[0240] The p450 fragments were generated by PCR amplification from the constructed cDNA library as described in Example 3 with the exception of the reverse primer. The T7 primer located on the plasmid downstream of cDNA inserts (see FIG. 75) was used as a reverse primer. PCR fragments were isolated, cloned and sequenced as described in Example 4.

[0241] Full-length p450 genes were isolated by PCR method from constructed cDNA library. Gene specific reverse primers (designed from the downstream sequence of p450 fragments) and a forward primer (T3 on library plasmid) were used to clone the full length genes. PCR fragments were isolated, cloned and sequenced. If necessary, second step PCR was applied. In the second step, new forward primers designed from 5′UTR of cloned p450s together with the reverse primers designed from 3′UTR of p450 clones were used in the subsequent PCR reactions to obtain full-length p450 clones. The clones were subsequently sequenced.

### Example 6

### Characterization of Cloned Fragments—Reverse Southern Blotting Analysis

[0242] Nonradioactive large scale reverse southern blotting assays were performed on all p450 clones identified in above examples to detect the differential expression. It was observed that the level of expression among different p450 clusters was very different. Further real time detection was conducted on those with high expression.

[0243] Nonradioactive Southern blotting procedures were conducted as follows.

[0244] 1) Total RNA was extracted from ethylene treated and nontreated converter (58-33) and nonconverter (58-25) leaves using the Qiagen Rnaeasy kit as described in Example 2.

[0245] 2) Probe was produced by biotin-tail labeling a single strand cDNA derived from poly A+ enriched RNA generated in above step. This labeled single strand cDNA was generated by RT-PCR of the converter and nonconverter total RNA (Invitrogen) as described in Example 3 with the exception of using biotinalyted oligo dT as a primer (Promega). These were used as a probe to hybridize with cloned DNA.

[0246] 3) Plasmid DNA was digested with restriction enzyme EcoR1 and run on agarose gels. Gels were simultaneously dried and transferred to two nylon membranes (Biodyne B®). One membrane was hybridized with converter probe and the other with nonconverter probe. Membranes were UV-crosslinked (auto crosslink setting, 254 nm, Stratagene, Stratalinker) before hybridization.

[0247] Alternatively, the inserts were PCR amplified from each plasmid using the sequences located on both arms of p-GEM plasmid, T3 and SP6, as primers. The PCR products were analyzed by running on a 96 well Ready-to-run agarose gels. The confirmed inserts were dotted on two nylon membranes. One membrane was hybridized with converter probe and the other with nonconverter probe.

[0248] 4) The membranes were hybridized and washed following manufacture's instruction with the modification of washing stringency (Enzo MaxSence mkit, Enzo Diagnostics, Inc, Farmingdale, N.Y.). The membranes were prehybridized with hybridization buffer (2×SSC buffered formamide, containing detergent and hybridization enhancers) at 42° C. for 30 min and hybridized with 10 μl denatured probe overnight at 42° C. The membranes then were washed in 1× hybridization wash buffer 1 time at room temperature for 10 min and 4 times at 68° C. for 15 min. The membranes were ready for the detection.

[0249] 5) The washed membranes were detected by alkaline phosphatase labeling followed by NBT/BCIP colometric detection as described in manufacture's detection procedure (Enzo Diagnostics, Inc.). The membranes were blocked for one hour at room temperature with 1× blocking solution, washed 3 times with 1× detection reagents for 10 min, washed 2 times with 1× predevelopment reaction buffer for 5 min and then developed the blots in developing solution for 30-45 min until the dots appear. All reagents were provided by manufacture (Enzo Diagnostics, Inc). In Addition, large scale reverse Southern assay was also performed using KPL southern hybridization and detection kit™ following manfacturer's instruction(KPL, Gaithersburg, Md.).

### Example 7

### Characterization of Clones—Northern Blot Analysis

[0250] Alternative to Southern Blot analysis, some membranes were hybridized and detected as described in the example of Northern blotting assays. Northern Hybridization was used to detect mRNA differentially expressed in Nicotiana as follows.

[0251] A random priming method was used to prepare probes from cloned p450 (Megaprime™ DNA Labelling Systems, Amersham Biosciences).

[0252] The following components were mixed: 25 ng denatured DNA template; 0.4 ul of each unlabeled dTTP, dGTP and dCTP; 5 ul of reaction buffer; P³²-labelled DATP and 2 ul of Klenow I; and H₂O, to bring the reaction to 50 μl. The mixture was incubated in 37° C. for 1-4 hours, then stopped with 2 μl of 0.5 M EDTA. The probe was denatured by incubating at 95° C. for 5 minutes before use.

[0253] RNA samples were prepared from ethylene treated and non-treated fresh leaves of several pairs of tobacco lines. In some cases poly A+ enriched RNA was used. Approximately 15 μg total RNA or 1.8 μg mRNA (methods of RNA and mRNA extraction as described in Example 5) were brought to equal volume with DEPC H₂O (5-10 μl). The same volume of loading buffer (1×MOPS; 18.5% Formaldehyde; 50% Formamide; 4% Ficoll400; Bromophenolblue) and 0.5 μl EtBr (0.5 μg/μl) were added. The samples were subsequently denatured in preparation for separation of the RNA by electrophoresis.

[0254] Samples were subjected to electrophoresis on a formaldehyde gel (1% Agarose, 1×MOPS, 0.6 M Formaldehyde) with 1×MOP buffer (0.4 M Morpholinopropanesulfonic acid; 0.1 M Na-acetate-3×H₂O; 10 mM EDTA; adjust to pH 7.2 with NaOH). RNA was transferred to a Hybond-N+ membrane (Nylon, Amersham Pharmacia Biotech) by capillary method in 10×SSC buffer (1.5 M NaCl; 0.15 M Na-citrate) for 24 hours. Membranes with RNA samples were UV-crosslinked (auto crosslink setting, 254 nm, Stratagene, Stratalinker) before hybridization.

[0255] The membrane was prehybridized for 1-4 hours at 42° C. with 5-10 ml prehybridization buffer (5×SSC; 50% Formamide; 5× Denhardt's-solution; 1% SDS; 100 μg/ml heat-denatured sheared non-homologous DNA). Old prehybridization buffer was discarded, and new prehybridization buffer and probe were added. The hybridization was carried out over night at 42° C. The membrane was washed for 15 minutes with 2×SSC at room temperature, followed by a wash with 2×SSC.

[0256] A major focus of the invention was the discovery of novel genes that may be induced as a result of ethylene treatment or play a key role in tobacco leaf quality and constituents. As illustrated in the table below, Northern blots and reverse Southern Blot were useful in determining which genes were induced by ethylene treatment relative to non-induced plants. Interestingly, not all fragments were affected similarly in the converter and nonconverter. The cytochrome p450 fragments of interest were partially sequenced to determine their structural relatedness. This information was used to subsequently isolate and characterize full length gene clones of interest.

| | |
|---|---|
| | Induced mRNA Expression |
| | Ethylene Treatment |
| Fragments | Converter |

| | | |
|---|---|---|
| D56-AC7 | (SEQ ID No: 35) | + |
| D56-AG11 | (SEQ ID No: 31) | + |
| D56-AC12 | (SEQ ID No: 45) | + |
| D70A-AB5 | (SEQ ID No: 95) | + |
| D73-AC9 | (SEQ ID No: 43) | + |
| D70A-AA12 | (SEQ ID No: 131) | + |
| D73A-AG3 | (SEQ ID No: 129) | + |
| D34-52 | (SEQ ID No: 61) | + |
| D56-AG6 | (SEQ ID No: 51) | + |

[0257] Northern analysis was performed using full length clones on tobacco tissue obtained from converter and nonconverter burley lines that were induced by ethylene treatment. The purpose was to identify those full length clones that showed elevated expression in ethylene induced converter lines relative to ethylene induced converter lines relative to ethylene induced nonconverter burley lines. By so doing, the functionality relationship of full length clones may be determined by comparing biochemical differences in leaf constituents between converter and nonconverter lines. As shown in table below, six clones showed significantly higher expression, as denoted by ++ and +++, in converter ethylene treated tissue than that of nonconverter treated tissue, denoted by +. All of these clones showed little or no expression in converter and nonconverter lines that were not ethylene treated.

| Full Length | | |
|---|---|---|
| Clones | Converter | Nonconverter |
| D101-BA2 | ++ | + |
| D207-AA5 | ++ | + |
| D208-AC8 | +++ | + |
| D237-AD1 | ++ | + |
| D89-AB1 | ++ | + |
| D90A-BB3 | ++ | + |

### Example 8

### Immunodetection of P450S Encoded by the Cloned Genes

[0258] Peptide regions corresponding to 20-22 amino acids in length from three p450 clones were selected for 1) having lower or no homology to other clones and 2) having good hydrophilicity and antigenicity. The amino acid sequences of the peptide regions selected from the respective p450 clones are listed below. The synthesized peptides were conjugated with KHL and then injected into rabbits. Antisera were collected 2 and 4 weeks after the 4^{th} injection (Alpha Diagnostic Intl. Inc. San Antonio, Tex.).

| | |
|---|---|
| D234-AD1 | DIDGSKSKLVKAHRKIDEILG |
| D90a-BB3 | RDAFREKETFDENDVEELNY |
| D89-AB1 | FKNNGDEDRHFSQKLGDLADKY |

[0259] Antisera were examined for crossreactivity to target proteins from tobacco plant tissue by Western Blot analysis. Crude protein extracts were obtained from ethylene treated (0 to 40 hours) middle leaves of converter and nonconverter lines. Protein concentrations of the extracts were determined using RC DC Protein Assay Kit (BIO-RAD) following the manufacturer's protocol.

[0260] Two micrograms of protein were loaded onto each lane and the proteins separated on 10%-20% gradient gels using the Laemmli SDS-PAGE system. The proteins were transferred from gels to PROTRAN® Nitrocellulose Transfer Membranes (Schleicher & Schuell) with the Trans-Blot® Semi-Dry cell (BIO-RAD). Target p450 proteins were detected and visualized with the ECL Advance™ Western Blotting Detection Kit (Amersham Biosciences). Primary antibodies against the synthetic-KLH conjugates were made in rabbits. Secondary antibody against rabbit IgG, coupled with peroxidase, was purchased from Sigma. Both primary and secondary antibodies were used at 1:1000 dilutions. Antibodies showed strong reactivity to a single band on the Western Blots indicating that the antisera were monospecific to the target peptide of interest. Antisera were also crossreactive with synthetic peptides conjuated to KLH.

### Example 9

### Nucleic Acid Identity and Structure Relatedness of Isolated Nucleic Acid Fragments

[0261] Over 100 cloned p450 fragments were sequenced in conjunction with Northern blot analysis to determine their structural relatedness. The approach used utilized forward primers based either of two common p450 motifs located near the carboxyl-terminus of the p450 genes. The forward primers corresponded to cytochrome p450 motifs FXPERF or GRRXCP(A/G) as denoted in FIG. 1. The reverse primers used standard primers from either the plasmid, SP6 or T7 located on both arms of pGEM™ plasmid, or a poly A tail. The protocol used is described below.

[0262] Spectrophotometry was used to estimate the concentration of starting double stranded DNA following the manufacturer's protocol (Beckman Coulter). The template was diluted with water to the appropriate concentration, denatured by heating at 95° C. for 2 minutes, and subsequently placed on ice. The sequencing reaction was prepared on ice using 0.5 to 10 μl of denatured DNA template, 2 μl of 1.6 μmole of the forward primer, 8 μl of DTCS Quick Start Master Mix and the total volume brought to 20 μl with water. The thermocycling program consisted of 30 cycles of the follow cycle: 96° C. for 20 seconds, 50° C. for 20 seconds, and 60° C. for 4 minutes followed by holding at 4° C.

[0263] The sequence was stopped by adding 5 μl of stop buffer (equal volume of 3M NaOAc and 100 mM EDTA and 1 μl of 20 mg/ml glycogen). The sample was precipitated with 60 μl of cold 95% ethanol and centrifuged at 6000 g for 6 minutes. Ethanol was discarded. The pellet was 2 washes with 200 μl of cold 70% ethanol. After the pellet was dry, 40 μl of SLS solution was added and the pellet was resuspended. A layer of mineral oil was over laid. The sample was then, placed on the CEQ 8000 Automated Sequencer for further analysis.

[0264] In order to verify nucleic acid sequences, nucleic acid sequence was re-sequenced in both directions using forward primers to the FXPERF or GRRXCP(A/G) region of the p450 gene or reverse primers to either the plasmid or poly A tail. All sequencing was performed at least twice in both directions.

[0265] The nucleic acid sequences of cytochrome p450 fragments were compared to each other from the coding region corresponding to the first nucleic acid after the region encoding the GRRXCP(A/G) motif through to the stop codon. This region was selected as an indicator of genetic diversity among p450 proteins. A large number of genetically distinct p450 genes, in excess of 70 genes, were observed, similar to that of other plant species. Upon comparison of nucleic acid sequences, it was found that the genes could be placed into distinct sequences groups based on their sequence identity. It was found that the best unique grouping of p450 members was determined to be those sequences with 75% nucleic acid identity or greater (shown in Table I). Reducing the percentage identity resulted in significantly larger groups. A preferred grouping was observed for those sequences with 81% nucleic acid identity or greater, a more preferred grouping 91% nucleic acid identity or greater, and a most preferred grouping for those sequences 99% nucleic acid identity of greater. Most of the groups contained at least two members and frequently three or more members. Others were not repeatedly discovered suggesting that approach taken was able to isolated both low and high expressing mRNA in the tissue used.

[0266] Based on 75% nucleic acid identity or greater, two cytochrome p450 groups were found to contain nucleic acid sequence identity to previously tobacco cytochrome genes that genetically distinct from that within the group. Group 23, showed nucleic acid identity, within the parameters used for Table I, to prior GenBank sequences of GI:1171579 (CAA64635) and GI:14423327 (or AAK62346) by Czernic et al and Ralston et al, respectively. GI:1171579 had nucleic acid identity to Group 23 members ranging 96.9% to 99.5% identity to members of Group 23 while GI:14423327 ranged 95.4% to 96.9% identity to this group. The members of Group 31 had nucleic acid identity ranging from 76.7% to 97.8% identity to the GenBank reported sequence of GI:14423319 (AAK62342) by Ralston et al. None of the other p450 identity groups of Table 1 contained parameter identity, as used in Table 1, to Nicotiana p450s genes reported by Ralston et al, Czernic et al., Wang et al or LaRosa and Smigocki.

[0267] As shown in FIG. 76, consensus sequence with appropriate nucleic acid degenerate probes could be derived for group to preferentially identify and isolate additional members of each group from Nicotiana plants.

TABLE I

Nicotiana p450 Nucleic Acid Sequence
Identity Groups

| | |
|---|---|
| GROUP | FRAGMENTS |

| | | |
|---|---|---|
| 1 | D58-BG7, | (SEQ ID No.: 1) |
| | D58-AB1; | (SEQ ID No.: 3) |
| | D58-BE4 | (SEQ ID No.: 7) |
| 2 | D56-AH7; | (SEQ ID No.: 9) |
| | D13a-5 | (SEQ ID No.: 11) |
| 3 | D56-AG10; | (SEQ ID No.: 13) |
| | D35-33; | (SEQ ID No.: 15) |
| | D34-62 | (SEQ ID No.: 17) |
| 4 | D56-AA7; | (SEQ ID No.: 19) |
| | D56-AE1; | (SEQ ID No.: 21) |
| | 185-BD3 | (SEQ ID No.: 143) |
| 5 | D35-BB7; | (SEQ ID No.: 23) |
| | D177-BA7; | (SEQ ID No.: 25) |
| | D56A-AB6; | (SEQ ID No.: 27) |
| | D144-AE2 | (SEQ ID No.: 29) |
| 6 | D56-AG11; | (SEQ ID No.: 31) |
| | D179-AA1 | (SEQ ID No.: 33) |
| 7 | D56-AC7; | (SEQ ID No.: 35) |
| | D144-AD1 | (SEQ ID No.: 37) |
| 8 | D144-AB5 | (SEQ ID No.: 39) |
| 9 | D181-AB5; | (SEQ ID No.: 41) |
| | D73-Ac9 | (SEQ ID No.: 43) |
| 10 | D56-AC12 | (SEQ ID No.: 45) |
| 11 | D58-AB9; | (SEQ ID No.: 47) |
| | D56-AG9; | (SEQ ID No.: 49) |
| | D56-AG6; | (SEQ ID No.: 51) |
| | D35-BG11; | (SEQ ID No.: 53) |
| | D35-42; | (SEQ ID No.: 55) |
| | D35-BA3; | (SEQ ID No.: 57) |
| | D34-57; | (SEQ ID No.: 59) |
| | D34-52; | (SEQ ID No.: 61) |
| | D34-25 | (SEQ ID No.: 63) |
| 12 | D56-AD10 | (SEQ ID No.: 65) |
| 13 | 56-AA11 | (SEQ ID No.: 67) |
| 14 | D177-BD5; | (SEQ ID No.: 69) |
| | D177-BD7 | (SEQ ID No.: 83) |
| 15 | D56A-AG10; | (SEQ ID No.: 71) |
| | D58-BC5; | (SEQ ID No.: 73) |
| | D58-AD12 | (SEQ ID No.: 75) |
| 16 | D56-AC11; | (SEQ ID No.: 77) |
| | D35-39; | (SEQ ID No.: 79) |
| | D58-BH4; | (SEQ ID No.: 81) |
| | D56-AD6 | (SEQ ID No.: 87) |
| 17 | D73A-AD6; | (SEQ ID No.: 89) |
| | D70A-BA11 | (SEQ ID No.: 91) |
| 18 | D70A-AB5; | (SEQ ID No.: 95) |
| | D70A-AA8 | (SEQ ID No.: 97) |
| 19 | D70A-AB8; | (SEQ ID No.: 99) |
| | D70A-BH2; | (SEQ ID No.: 101) |
| | D70A-AA4 | (SEQ ID No.: 103) |
| 20 | D70A-BA1; | (SEQ ID No.: 105) |
| | D70A-BA9 | (SEQ ID No.: 107) |
| 21 | D70A-BD4 | (SEQ ID No.: 109) |
| 22 | D181-AC5; | (SEQ ID No.: 111) |
| | D144-AH1; | (SEQ ID No.: 113) |
| | D34-65 | (SEQ ID No.: 115) |
| 23 | D35-BG2 | (SEQ ID No.: 117) |
| 24 | D73A-AH7 | (SEQ ID No.: 119) |
| 25 | D58-AA1; | (SEQ ID No.: 121) |
| | D185-BC1; | (SEQ ID No.: 133) |
| | D185-BG2 | (SEQ ID No.: 135) |
| 26 | D73-AE10 | (SEQ ID No.: 123) |
| 27 | D56-AC12 | (SEQ ID No.: 125) |
| 28 | D177-BF7; | (SEQ ID No.: 127) |
| | D185-BE1; | (SEQ ID No.: 137) |
| | D185-BD2 | (SEQ ID No.: 139) |
| 29 | D73A-AG3 | (SEQ ID No.: 129) |
| 30 | D70A-AA12; | (SEQ ID No.: 131) |
| | D176-BF2 | (SEQ ID No.: 85) |
| 31 | D176-BC3 | (SEQ ID No.: 145) |
| 32 | D176-BB3 | (SEQ ID No.: 147) |
| 33 | D186-AH4 | (SEQ ID No.: 5) |

### Example 10

### Related Amino Acid Sequence Identity of Isolated Nucleic Acid Fragments

[0268] The amino acid sequences of nucleic acid sequences obtained for cytochrome p450 fragments from Example 8 were deduced. The deduced region corresponded to the amino acid immediately after the GXRXCP(A/G) sequence motif to the end of the carboxyl-terminus, or stop codon. Upon comparison of sequence identity of the fragments, a unique grouping was observed for those sequences with 70% amino acid identity or greater. A preferred grouping was observed for those sequences with 80% amino acid identity or greater, more preferred with 90% amino acid identity or greater, and a most preferred grouping for those sequences 99% amino acid identity of greater. The groups and corresponding amino acid sequences of group members are shown in FIG. 2. Several of the unique nucleic acid sequences were found to have complete amino acid identity to other fragments and therefore only one member with the identical amino acid was reported.

[0269] The amino acid identity for Group 19 of Table II corresponded to three distinct groups based on their nucleic acid sequences. The amino acid sequences of each group member and their identity is shown in FIG. 77. The amino acid differences are appropriated marked.

[0270] At least one member of each amino acid identity group was selected for gene cloning and functional studies using plants. In addition, group members that are differentially affected by ethylene treatment or other biological differences as assessed by Northern and Southern analysis were selected for gene cloning and functional studies. To assist in gene cloning, expression studies and whole plant evaluations, peptide specific antibodies will be prepared on sequence identity and differential sequence.

TABLE II

Nicotiana p450 Amino Acid Sequence
Identity Groups

| | |
|---|---|
| GROUP | FRAGMENTS |

| | | |
|---|---|---|
| 1 | D58-BG7, | (SEQ ID No.: 2) |
| | D58-AB1 | (SEQ ID No.: 4) |
| 2 | D58-BE4 | (SEQ ID No.: 8) |
| 3 | D56-AH7; | (SEQ ID No.: 10) |
| | D13a-5 | (SEQ ID No.: 12) |
| 4 | D56-AG10; | (SEQ ID No.: 14) |
| | D34-62 | (SEQ ID No.: 18) |
| 5 | D56-AA7; | (SEQ ID No.: 20) |
| | D56-AE1; | (SEQ ID No.: 22) |
| | 185-BD3 | (SEQ ID No.: 144) |
| 6 | D35-BB7; | (SEQ ID No.: 24) |
| | D177-BA7; | (SEQ ID No.: 26) |
| | D56A-AB6; | (SEQ ID No.: 28) |
| | D144-AE2 | (SEQ ID No.: 30) |
| 7 | D56-AG11; | (SEQ ID No.: 32) |
| | D179-AA1 | (SEQ ID No.: 34) |
| 8 | D56-AC7; | (SEQ ID No.: 36) |
| | D144-AD1 | (SEQ ID No.: 38) |
| 9 | D144-AB5 | (SEQ ID No.: 40) |
| 10 | D181-AB5; | (SEQ ID No.: 42) |
| | D73-Ac9 | (SEQ ID No.: 44) |
| 11 | D56-AC12 | (SEQ ID No.: 46) |
| 12 | D58-AB9; | (SEQ ID No.: 48) |
| | D56-AG9; | (SEQ ID No.: 50) |
| | D56-AG6; | (SEQ ID No.: 52) |
| | D35-BG11; | (SEQ ID No.: 54) |
| | D35-42; | (SEQ ID No.: 56) |
| | D35-BA3 | (SEQ ID No.: 58) |
| | D34-57; | (SEQ ID No.: 60) |
| | D34-52 | (SEQ ID No.: 62) |
| 13 | D56AD10 | (SEQ ID No.: 66) |
| 14 | 56-AA11 | (SEQ ID No.: 68) |
| 15 | D177-BD5; | (SEQ ID No.: 70) |
| | D177-BD7 | (SEQ ID No.: 84) |
| 16 | D56A-AG10; | (SEQ ID No.: 72) |
| | D58-BC5; | (SEQ ID No.: 74) |
| | D58-AD12 | (SEQ ID No.: 76) |
| 17 | D56-AC11; | (SEQ ID No.: 78) |
| | D56-AD6 | (SEQ ID No.: 88) |
| 18 | D73A-AD6 | (SEQ ID No.: 90) |
| 19 | D70A-AB5; | (SEQ ID No.: 96) |
| | D70A-AB8; | (SEQ ID No.: 100) |
| | D70A-BH2; | (SEQ ID No.: 102) |
| | D70A-AA4; | (SEQ ID No.: 104) |
| | D70A-BA1; | (SEQ ID No.: 106) |
| | D70A-BA9 | (SEQ ID No.: 108) |
| 20 | D70A-BD4 | (SEQ ID No.: 110) |
| 21 | D181-AC5; | (SEQ ID No.: 112) |
| | D144-AH1; | (SEQ ID No.: 114) |
| | D34-65 | (SEQ ID No.: 116) |
| 22 | D35-BG2 | (SEQ ID No.: 118) |
| 23 | D73A-AH7 | (SEQ ID No.: 120) |
| 24 | D58-AA1; | (SEQ ID No.: 122) |
| | D185-BC1; | (SEQ ID No.: 134) |
| | D185-BG2 | (SEQ ID No.: 136) |
| 25 | D73-AE10 | (SEQ ID No.: 124) |
| 26 | D56-AC12 | (SEQ ID No.: 126) |
| 27 | D177-BF7; | (SEQ ID No.: 128) |
| | 185-BD2 | (SEQ ID No.: 140) |
| 28 | D73A-AG3 | (SEQ ID No.: 130) |
| 29 | D70A-AA12; | (SEQ ID No.: 132) |
| | D176-BF2 | (SEQ ID No.: 86) |
| 30 | D176-BC3 | (SEQ ID No.: 146) |
| 31 | D176-BB3 | (SEQ ID No.: 148) |
| 32 | D186-AH4 | (SEQ ID No.: 6) |

### Example 11

### Related Amino Acid Sequence Identity of Full Length Clones

[0271] The nucleic acid sequence of full length Nicotiana genes cloned in Example 5 were deduced for their entire amino acid sequence. Cytochrome p450 genes were identified by the presence of three conserved p450 domain motifs, which corresponded to UXXRXXZ, PXRFXF or GXRXC at the carboxyl-terminus where U is E or K, X is any amino acid and Z is P, T, S or M. It was also noted that two of the clones appeared nearly complete but lacked the appropriate stop codon, D130-AA1 and D11-BA2, however but both contained all three p450 cytochrome domains. All p450 genes were characterized for amino acid identity using a BLAST program comparing their full length sequences to each other and to known tobacco genes. The program used the NCBI special BLAST tool (Align two sequences (b12seq), http://www.ncbi.nlm.nih.gov/blast/b12seq/b12.html). Two sequences were aligned under BLASTN without filter for nucleic acid sequences and BLASTP for amino acid sequences. Based on their percentage amino acid identity, each sequence was grouped into identity groups where the grouping contained members that shared at least 85% identity with another member. A preferred grouping was observed for those sequences with 90% amino acid identity or greater, a more preferred grouping had 95% amino acid identity or greater, and a most preferred grouping had those sequences 99% amino acid identity or greater. Using these criteria, 25 unique groups were identified and are depicted in Table III.

[0272] Within the parameters used for Table III for amino acid identity, three groups were found to contain greater than 85% or greater identity to known tobacco genes. Members of Group 5 had up to 96% amino acid identity for full length sequences to prior GenBank sequences of GI:14423327 (or AAK62346) by Ralston et al. Group 23 had up to 93% amino acid identity to GI:14423328 (or AAK62347) by Ralston et al. and Group 24 had 92% identity to GI:14423318 (or AAK62343) by Ralston et al.

TABLE III

Amino Acid Sequence Identity Groups of Full
Length Nicotiana p450 Genes

| | | |
|---|---|---|
| 1 | D208-AD9; | (SEQ. ID. No. 224) |
| | D120-AH4; | (SEQ. ID. No. 180) |
| | D121-AA8, | (SEQ. ID. No. 182) |
| | D122-AF10; | (SEQ. ID. No. 184) |
| | D103-AH3; | (SEQ. ID. No. 222) |
| | D208-AC8; | (SEQ. ID. No. 218) |
| | D-235-ABI | (SEQ. ID. No. 246) |
| 2 | D244-AD4; | (SEQ. ID. No. 250) |
| | D244-AB6; | (SEQ. ID. No. 274) |
| | D285-AA8; | |
| | D285-AB9; | |
| | D268-AE2 | (SEQ. ID. No. 270) |
| 3 | D100A-AC3; | (SEQ. ID. No. 168) |
| | D100A-BE2 | |
| 4 | D205-BE9; | (SEQ. ID. No. 276) |
| | D205-BG9; | (SEQ. ID. No. 202) |
| | D205-AH4 | (SEQ. ID. No. 294) |
| 5 | D259-AB9; | (SEQ. ID. No. 260) |
| | D257-AE4; | (SEQ. ID. No. 268) |
| | D147-AD3 | (SEQ. ID. No. 194) |
| 6 | D249-AE8; | (SEQ. ID. No. 256) |
| | D-248-AA6 | (SEQ. ID. No. 254) |
| 7 | D233-AG7; | (SEQ. ID. No. 266 |
| | D224-BD11; | (SEQ. ID. No. 240) |
| | DAF10 | |
| 8 | D105-AD6; | (SEQ. ID. No. 172) |
| | D215-AB5; | (SEQ. ID. No. 220) |
| | D135-AE1 | (SEQ. ID. No. 190) |
| 9 | D87A-AF3, | (SEQ. ID. No. 216) |
| | D210-BD4 | (SEQ. ID. No. 262) |
| 10 | D89-AB1; | (SEQ. ID. No. 150) |
| | D89-AD2; | (SEQ. ID. No. 152) |
| | 163-AG11; | (SEQ. ID. No. 198) |
| | 163-AF12 | (SEQ. ID. No. 196) |
| 11 | D267-AF10; | (SEQ. ID. No. 296) |
| | D96-AC2; | (SEQ. ID. No. 160) |
| | D96-AB6; | (SEQ. ID. No. 158) |
| | D207-AA5; | (SEQ. ID. No. 204) |
| | D207-AB4; | (SEQ. ID. No. 206) |
| | D207-AC4 | (SEQ. ID. No. 208) |
| 12 | D98-AG1; | (SEQ. ID. No. 164) |
| | D98-AA1 | (SEQ. ID. No. 162) |
| 13 | D209-AA12; | (SEQ. ID. No. 212) |
| | D209-AA11; | |
| | D209-AH10; | (SEQ. ID. No. 214) |
| | D209-AH12; | (SEQ. ID. No. 232) |
| | D90a-BB3 | (SEQ. ID. No. 154) |
| 14 | D129-AD10; | (SEQ. ID. No. 188) |
| | D104A-AE8 | (SEQ. ID. No. 170) |
| 15 | D228-AH8; | (SEQ. ID. No. 244) |
| | D228-AD7, | (SEQ. ID. No. 241) |
| | D250-AC11; | (SEQ. ID. No. 258) |
| | D247-AH1 | (SEQ. ID. No. 252) |
| 16 | D128-AB7; | (SEQ. ID. No. 186) |
| | D243-AA2; | (SEQ. ID. No. 248) |
| | D125-AF11 | (SEQ. ID. No. 228) |
| 17 | D284-AH5; | (SEQ. ID. No. 298) |
| | D110-AF12 | (SEQ. ID. No. 176) |
| 18 | D221-BB8 | (SEQ. ID. No. 234) |
| 19 | D222-BH4 | (SEQ. ID. No. 236) |
| 20 | D134-AE11 | (SEQ. ID. No. 230) |
| 21 | D109-AH8 | (SEQ. ID. No. 174) |
| 22 | D136-AF4 | (SEQ. ID. No. 278) |
| 23 | D237-AD1 | (SEQ. ID. No. 226) |
| 24 | D112-AA5 | (SEQ. ID. No. 178) |
| 25 | D283-AC1 | (SEQ. ID. No. 272) |

[0273] The full length genes were further grouped based on the highly conversed amino acid homology between UXXRXXZ p450 domain and GXRXC p450 domain near the end the carboxyl-terminus. As shown in FIG. 3, individual clones were aligned for their sequence homology between the conserved domains relative to each other and placed in distinct identity groups. In several cases, although the nucleic acid sequence of the clone was unique, the amino acid sequence for the region was identical. The preferred grouping was observed for those sequences with 90% amino acid identity or greater, a more preferred group had 95% amino acid identity or greater, and a most preferred grouping had those sequences 99% amino acid identity of greater. The final grouping was similar to that based on the percent identity for the entire amino acid sequence of the clones except for Group 17 (of Table III) which was divided into two distinct groups.

[0274] Within the parameters used for amino acid identity in Table IV, three groups were found to contain 90% or greater identity to known tobacco genes. Members of Group 5 had up to 93.4% amino acid identity for full length sequences to prior GenBank sequences of GI:14423326 (AAK62346) by Ralston et al. Group 23 had up to 91.8% amino acid identity to GI:14423328 (or AAK62347) by Ralston et al. and Group 24 had 98.8% identity to GI:14423318 (or AAK62342) by Ralston et al.

TABLE IV

Amino Acid Sequence Identity Groups of
Regions between Conserved Domains of
Nicotiana p450 Genes

| | | |
|---|---|---|
| 1 1 | D208-AD9; | (SEQ. ID. No. 224) |
| | D120-AH4; | (SEQ. ID. No. 180) |
| | D121-AA8, | (SEQ. ID. No. 182) |
| | D122-AF10; | (SEQ. ID. No. 184) |
| | D103-AH3; | (SEQ. ID. No. 222) |
| | D208-AC8; | (SEQ. ID. No. 218) |
| | D-235-ABI | (SEQ. ID. No. 246) |
| 2 | D244-AD4; | (SEQ. ID. No. 250) |
| | D244-AB6; | (SEQ. ID. No. 274) |
| | D285-AA8; | |
| | D285-AB9; | |
| | D268-AE2 | (SEQ. ID. No. 270) |
| 3 | D100A-AC3; | (SEQ. ID. No. 168) |
| | D100A-BE2 | |
| 4 | D205-BE9; | (SEQ. ID. No. 276) |
| | D205-BG9; | (SEQ. ID. No. 202) |
| | D205-AH4 | (SEQ. ID. No. 294) |
| 5 | D259-AB9; | (SEQ. ID. No. 260) |
| | D257-AE4; | (SEQ. ID. No. 268) |
| | D147-AD3 | (SEQ. ID. No. 194) |
| 6 | D249-AE8; | (SEQ. ID. No. 256) |
| | D-248-AA6 | (SEQ. ID. No. 254) |
| 7 | D233-AG7; | (SEQ. ID. No. 266 |
| | D224-BD11; | (SEQ. ID. No. 240) |
| | DAF10 | |
| 8 | D105-AD6; | (SEQ. ID. No. 172) |
| | D215-AB5; | (SEQ. ID. No. 220) |
| | D135-AE1 | (SEQ. ID. No. 190) |
| 9 | D87A-AF3, | (SEQ. ID. No. 216) |
| | D210-BD4 | (SEQ. ID. No. 262) |
| 10 | D89-AB1; | (SEQ. ID. No. 150) |
| | D89-AD2; | (SEQ. ID. No. 152) |
| | 163-AG11; | (SEQ. ID. No. 198) |
| | 163-AF12 | (SEQ. ID. No. 196) |
| 11 | D267-AF10; | (SEQ. ID. No. 296) |
| | D96-AC2; | (SEQ. ID. No. 160) |
| | D96-AB6; | (SEQ. ID. No. 158) |
| | D207-AA5; | (SEQ. ID. No. 204) |
| | D207-AB4; | (SEQ. ID. No. 206) |
| | D207-AC4 | (SEQ. ID. No. 208) |
| 12 | D98-AG1; | (SEQ. ID. No. 164) |
| | D98-AA1 | (SEQ. ID. No. 162) |
| 13 | D209-AA12; | (SEQ. ID. No. 212) |
| | D209-AA11; | |
| | D209-AH10; | (SEQ. ID. No. 214) |
| | D209-AH12; | (SEQ. ID. No. 232) |
| | D90a-BB3 | (SEQ. ID. No. 154) |
| 14 | D129-AD10; | (SEQ. ID. No. 188) |
| | D104A-AE8 | (SEQ. ID. No. 170) |
| 15 | D228-AH8; | (SEQ. ID. No. 244) |
| | D228-AD7, | (SEQ. ID. No. 241) |
| | D250-AC11; | (SEQ. ID. No. 258) |
| | D247-AH1 | (SEQ. ID. No. 252) |
| 16 | D128-AB7; | (SEQ. ID. No. 186) |
| | D243-AA2; | (SEQ. ID. No. 248) |
| | D125-AF11 | (SEQ. ID. No. 228) |
| 17 | D284-AH5; | (SEQ. ID. No. 298) |
| | D110-AF12 | (SEQ. ID. No. 176) |
| 18 | D221-BB8 | (SEQ. ID. No. 234) |
| 19 | D222-BH4 | (SEQ. ID. No. 236) |
| 20 | D134-AE11 | (SEQ. ID. No. 230) |
| 21 | D109-AH8 | (SEQ. ID. No. 174) |
| 22 | D136-AF4 | (SEQ. ID. No. 278) |
| 23 | D237-AD1 | (SEQ. ID. No. 226) |
| 24 | D112-AA5 | (SEQ. ID. No. 178) |
| 25 | D283-AC1 | (SEQ. ID. No. 272) |
| 26 | D110-AF12 | (SEQ. ID. No. 176) |

### Example 12

### Nicotiana Cytochrome P450 Clones Lacking One or More of the Tobacco Cytochrome P450 Specific Domains

[0275] Four clones had high nucleic acid homology, ranging 90% to 99% nucleic acid homology, to other tobacco cytochrome genes reported in Table III. The four clones included D136-AD5, D138-AD12, D243-AB3 and D250-AC11. However, due to a nucleotide frameshift these genes did not contain one or more of three C-terminus cytochrome p450 domains and were excluded from identity groups presented in Table III or Table IV.

[0276] The amino acid identity of one clone, D95-AG1, did not contain the third domain, GXRXC, used to group p450 tobacco genes in Table III or Table IV. The nucleic acid homology of this clone had low homology to other tobacco cytochrome genes. This clone represents a novel and different group of cytochrome p450 genes in Nicotiana.

### Example 13

### Use of Nicotiana Cytochrome P450 Fragments and Clones in Altered Regulartion of Tobacco Properties

[0277] The use of tobacco p450 nucleic acid fragments or whole genes are useful in identifying and selecting those plants that have altered tobacco phenotypes or tobacco constituents and, more importantly, altered metabolites. Transgenic tobacco plants are generated by a variety of transformation systems that incorporate nucleic acid fragments or full length genes, selected from those reported herein, in orientations for either down-regulation, for example anti-sense orientation, or over-expression for example, sense orienation. For over-expression to full length genes, any nucleic acid sequence that encodes the entire or a functional part or amino acide sequence of the full-length genes described in this invention are desired that are effective for increasing the expression of a certain enzyme and thus resulting in phenotypic effect within Nicotiana. Nicotiana lines that are homozygous lines are obtained through a series of backcrossing and assessed for phenotypic changes including, but not limited to, analysis of endogenous p450 RNA, transcripts, p450 expressed peptides and concentrations of plant metabolites using techniques commonly avaiable to one having ordinary skill in the art. The changes exhibited in the tobacco plans provide information on the functional role of the selected gene of interest or are of a utility as a preffered Nicotiana plant species.

### Example 14

### Identification of Genes Induced in Ethylene Treated Converter Lines

[0278] High density oligonucleotide array technology, Affymetrix GeneChip® (Affymetrix Inc., Santa Clara, Calif.) array, was used for quantitative and highly parallel measurements of gene expression. In using this technology, nucleic acid arrays were fabricated by direct synthesis of oligonucleotides on a solid surface. This solid-phase chemistry is able to produce arrays containing hundreds of thousands of oligonucleotide probes packed at extremely high densities on a chip referred to as GeneChip®. Thousands of genes can be simultaneously screened from a single hybridization. Each gene is typically represented by a set of 11-25 pairs of probes depending upon size. The probes are designed to maximize sensitivity, specificity, and reproducibility, allowing consistent discrimination between specific and background signals, and between closely related target sequences.

[0279] Affymetrix GeneChip hybridization experiments involve the following steps: design and production of arrays, preparation of fluorescently labeled target from RNA isolated from the biological specimens, hybridization of the labeled target to the GeneChip, screening the array, and analysis of the scanned image and generation of gene expression profiles.

A. Designing and Custom Making Affymetrix GeneChip

[0280] A GeneChip CustomExpress Advantage Array was custom made by Affymetrix Inc. (Santa Clara, Calif.). Chip size was 18 micron and array format was 100-2187 that can accommodate 528 probe sets (11, 628 probes). Except for GenBank derived nucleic acid sequences, all sequences were selected from our previously identified tobacco clones and all probes were custom designed. A total of 400 tobacco genes or fragments were selected to be included on the GeneChip. The sequences of oligonucleotides selected were based on unique regions of the 3′ end of the gene. The selected nucleic acid sequences consisted of 56 full length p450 genes and 71 p450 fragments that were cloned from tobacco, described in (patent applications). Other tobacco sequences included 270 tobacco ESTs which were generated from suppression subtraction library using Clontech SSH kit(BD Biosciences, Palo Alto, Calif.). Among these genes, some oligonucleotide sequences were selected from cytochrome P450 genes listed in GenBank. Up to 25 probes were used for each full length gene and 11 probes for each fragment. A reduced number of probes were used for some clones due to the lack of unique, high quality probes. Appropriate control sequences were also included on the GeneChip®.

[0281] The probe Arrays were 25-mer oligonucleotides that were directly synthesized onto a glass wafer by a combination of semiconductor-based photolithography and solid phase chemical synthesis technologies. Each array contained up to 100,000 different oligonucleotide probes. Since oligonucleotide probes are synthesized in known locations on the array, the hybridization patterns and signal intensities can be interpreted in terms of gene identity and relative expression levels by the Affymetrix Microarray Suite® software. Each probe pair consists of a perfect match oligonucleotide and a mismatch oligonucleotide. The perfect match probe has a sequence exactly complimentary to the particular gene and thus measures the expression of the gene. The mismatch probe differs from the perfect match probe by a single base substitution at the center base position, which disturbs the binding of the target gene transcript. The mismatch produces a nonspecific hybridization signal or background signal that was compared to the signal measured for the perfect match oligonucleotide.

B. Sample Preparation

[0282] Hybridization experiments were conducted by Genome Explorations, Inc. (Memphis, Tenn.). The RNA samples used in hybridization consisted of six pairs of nonconverter/converter isogenic lines that were induced by ethylene treatments. Samples included one pair of 4407-25/4407-33 non-treated burly tobacco samples, three pairs of ethylene treated 4407-25/4407-33 samples, one pair of ethylene treated dark tobacco NL Madole/181 and one pair of ethylene treated burly variety PBLB01/178. Ethylene treatment was as described in Example 1.

[0283] Total RNA was extracted from above mentioned ethylene treated and non-treated leaves using a modified acid phenol and chloroform extraction protocol. Protocol was modified to use one gram of tissue that was ground and subsequently vortexed in 5 ml of extraction buffer (100 mM Tris-HCl, pH 8.5; 200 mM NaCl; 10 mM EDTA; 0.5% SDS) to which 5 ml phenol (pH5.5) and 5 ml chloroform was added. The extracted sample was centrifuged and the supernatant was saved. This extraction step was repeated 2-3 more times until the supernatant appeared clear. Approximately 5 ml of chloroform was added to remove trace amounts of phenol. RNA was precipitated from the combined supernatant fractions by adding a 3-fold volume of ETOH and 1/10 volume of 3M NaOAc (pH5.2) and storing at −20° C. for 1 hour. After transferring to a Corex glass container the RNA fraction was centrifuged at 9,000 RPM for 45 minutes at 4° C. The pellet was washed with 70% ethanol and spun for 5 minutes at 9,000 RPM at 4° C. After drying the pellet, the pelleted RNA was dissolved in 0.5 ml RNase free water. The pelleted RNA was dissolved in 0.5 ml RNase free water. The quality and quantity of total RNA was analyzed by denatured formaldehyde gel and spectrophotometer, respectively. The total RNA samples with 3-5 μg/ul were sent to Genome explorations, inc. to do the hybridization.

C. Hybridization, Detection and Data Output

[0284] The preparation of labeled cRNA material was performed as follows. First and second strand cDNA were synthesized from 5-15 μg of total RNA using the SuperScript Double-Stranded cDNA Synthesis Kit (Gibco Life Technologies) and oligo-dT24-T7 (5′-GGC CAG TGA ATT GTA ATA CGA CTC ACT ATA GGG AGG CGG-3′) primer according to the manufacturer's instructions.

[0285] The cRNA was concurrently synthesized and labeled with biotinylated UTP and CTP by in vitro transcription using the T7 promoter coupled double stranded cDNA as template and the T7 RNA Transcript Labeling Kit (ENZO Diagnostics Inc.). Briefly, double stranded cDNA synthesized from the previous steps were washed twice with 70% ethanol and resuspended in 22 μl Rnase-free H₂O. The cDNA was incubated with 4 μl of 10× each Reaction Buffer, Biotin Labeled Ribonucleotides, DTT, Rnase Inhibitor Mix and 2 μl 20×T7 RNA Polymerase for 5 hr at 37° C. The labeled cRNA was separated from unincorporated ribonucleotides by passing through a CHROMA SPIN-100 column (Clontech) and precipitated at −20° C. for 1 hr to overnight.

[0286] Oligonucleotide array hybridization and analysis were performed as follows. The cRNA pellet was resuspended in 10 μl Rnase-free H₂O and 10.0 μg was fragmented by heat and ion-mediated hydrolysis at 95° C. for 35 mins in 200 mM Tris-acetate, pH 8.1, 500 mM KOAc, 150 mM MgOAc. The fragmented cRNA was hybridized for 16 hr at 45° C. to HG_U95Av2 oligonucleotide arrays (Affymetrix) containing ˜12,500 full length annotated genes together with additional probe sets designed to represent EST sequences. Arrays were washed at 25° C. with 6×SSPE (0.9M NaCl, 60 mMNaH2PO4, 6 mM EDTA+0.01% Tween 20) followed by a stringent wash at 50° C. with 100 mM MES, 0.1M [Na+], 0.01% Tween 20. The arrays were stained with phycoerythrein conjugated streptavidin (Molecular Probes) and the fluorescence intensities were determined using a laser confocal scanner (Hewlett-Packard). The scanned images were analyzed using Microarray software (Affymetrix). Sample loading and variations in staining were standardized by scaling the average of the fluorescent intensities of all genes on an array to constant target intensity (250) for all arrays used. Data Analysis was conducted using Microarray Suite 5.0 (Affymetrix) following user guidelines. The signal intensity for each gene was calculated as the average intensity difference, represented by [Σ(PM−MM)/(number of probe pairs)], where PM and MM denote perfect-match and mismatch probes.

D. Data Analysis and Results

[0287] Twelve sets of hybridizations were successful as evidenced by the Expression Report generated using detection instruments from Genome Explorations. The main parameters on the report included Noise, Scale factor, background, total probe sets, number and percentage of present and absent probe sets, signal intensity of housekeeping controls. The data was subsequently analyzed and presented using software GCOS in combination of other Microsoft software. Signal comparison between treatment pairs was analyzed. Overall data for all respective probes corresponding to genes and fragments of each different treatment including replications were compiled and compiled expression data such as call of the changes and signal log 2 ratio changes were analyzed.

[0288] A typical application of GeneChip technology is finding genes that are differentially expressed in different tissues. In the present application, genetic expression variations caused by ethylene treatment were determined for pairs of converter and nonconverter tobacco lines that included a 4407-25/4407-33 burley variety, PBLB01/178 burley variety, and a NL Madole/181 dark variety. These analyses detected only those genes whose expression is significantly altered due to biological variation. These analyses employed the Fold change (signal ratio) as a major criterion to identify induced genes. Other parameters, such as signal intensity, present/absent call, were also taken into consideration.

[0289] After analyzing the data for expression differences in converter and nonconverter pairs of samples for approximately 400 genes, the results based on the signal intensities showed that only two genes, D121-AA8 and D120-AH4, had reproducible induction in ethylene treated converter lines versus non-converter lines. To illustrate the differential expression of these genes, the data was represented as follows. As shown in Table V, the signal of a gene in a converter line, for example, burley tobacco variety, 4407-33, was determined as ratio to the signal of a related nonconverter isogenic line, 4407-25. Without ethylene treatment, the ratio of converter to nonconverter signals for all genes approached 1.00. Upon ethylene treatment, two genes, D121-AA8 and D120-AH4, were induced in converter lines relative to non-converter line as determined by three independent analyses using isogenic burley lines. These genes have very high homology to each other, approximately 99.8% or greater nucleic acid sequence homology. As depicted in Table V, their relative hybridization signals in converter varieties ranged from approximately 2 to 12 fold higher in converter lines than the signals in their non-converter counterparts. In comparison, two actin-like control clones, internal controls, were found not to be induced in converter lines based on their normalized ratios. In addition, a fragment (D35-BG11), whose sequence in coding region is entirely contained in both D121-AA8 and D120-AH4 genes, was highly induced in the same samples of paired isogenic converter and nonconverter lines. Another isogenic pair of burley tobacco varieties, PBLB01 and 178, was shown to have the same genes, D121-AA8 and D120-AH4, induced in converter samples under ethylene induction. Furthermore, D121-AA8 and D120-AH4 genes were preferentially induced in converter lines of isogenic dark tobacco pairs, NL Madole and 181, demonstrating that ethylene induction of these genes in converter lines was not limited to burley tobacco varieties. In all cases, the D35-BG11 fragment was the most highly induced in converter relative to nonconverter paired lines.

TABLE V
A Comparison of Clone Induction in Ethylene Treated
Converter and Non-Converter Lines

| | | Ethylene | | Ethylene | | Ethylene | | | |
|---|---|---|---|---|---|---|---|---|---|
| | | Treated | | Treated | | Treated | | Ethylene | |
| | | Burley | | Burley | | Burley | | Treated | |
| | No | Exp 1 | | Exp 2 | | Exp 3 | | Dark | |
| | Treatment | 33:25 | Et:No | 33:25 | Et:No | 33:25 | Et:No | 181:NL | Et:No |
| Clones | 33:25 Ratio | Ratio | Ratio | Ratio | Ratio | Ratio | Ratio | Ratio | Ratio |
| Induced | | | | | | | | | |
| D121-AA8 | 1.03 | 2.20 | 2.14 | 13.25 | 12.90 | 5.31 | 5.15 | 17.06 | 16.60 |
| D120-AH4 | 1.44 | 2.74 | 1.90 | 18.33 | 12.74 | 4.13 | 2.87 | 11.76 | 8.17 |
| Control | | | | | | | | | |
| Actin-Like I | 1.18 | 1.17 | 0.99 | 0.88 | 0.74 | 0.86 | 0.73 | 1.20 | 1.02 |
| Actin-Like I | 1.09 | 1.23 | 1.12 | 0.89 | 0.81 | 1.18 | 0.11 | 1.02 | 0.93 |

### Example 15

### Cloning Relatd D35-BG11 Full Length Genes

[0290] GeneChip hybridization was based on 3′ reverse transcription (cRNA). The probes were synthesized on GeneChip were chosen from the 3′ end of the genes (in the downstream 1000 nucleotide region). Therefore, in order to obtain all the possible variations of D121-AA8 and D120-AH4 clones, additional cloning was performed from the tobacco cDNA library using 5′ sequences.

[0291] The full length genes were cloned from cDNA library constructed from 4407-33 ethylene treated tissue as described in Example 5. The Polymerase Chain Reaction method was used as follows. The reverse primers were designed based on the 3′ sequence (including part of untranslated region) the D121-AA8 gene. The primer of D121-p2 5′-AGC AAG ATG ATC TTA GGT TTT AA-3′ and D121-R-2 5′-CAA GCA AGA TGA TCT TAG GTT TTA ATA AAG CTC AGG T-3′. The T3 primer (5′CAA TTA ACC CTC ACT AAA GGG 3′), located in upstream of the inserts in the plasmid, was used as forward primer The generated PCR products were subjected to agarose electrophoresis and the corresponding bands of high molecular weight were excised, purified, cloned and sequenced. The methods for cloning and sequencing were described in Example 4. Nine novel clones were sequenced and identified as D425-AB10, D425-AB11, D425-AC9, D425-AC10, D425-AC11, D425-AG11, D425-AH7, D425-AH11, and D427-AA5. Each of the clones was observed to have 99% or greater nucleic acid sequence homology with clones D121-AA8 and D120-AH4.

### Example 16

### Ethylene Induction of Microsomal Nicotine Demethylase in Tobacco Converter Lines

[0292] Biochemical analyses of demethylase enzymatic activity in microsomal enriched fractions of ethylene treated and non-treated pairs of converter and non-converter tobacco lines was performed as follows.

A. Preparation of Microsomes

[0293] Microsomes were isolated at 4° C. Tobacco leaves were extracted in a buffer consisting of 50 mM N-(2-hydrooxyethyl) piperazine-N′-(2-ethanesulfonic acid) (HEPES), pH 7.5, 3 mM DL-Dithiothreitol (DTT) and Protease Inhibitor Cocktail (Roche) at 1 tablet/50 ml. The crude extract was filtered through four layers of cheesecloth to remove undisrupted tissue, and the filtrate was centrifuged for 20 min at 20,000×g to remove cellular debris. The supernatant was subjected to ultracentrifugation at 100,000×g for 60 min and the resultant pellet contained the microsomal fraction. The microsomal fraction was suspended in the extraction buffer and applied to an ultracentrifugation step where a discontinuous sucrose gradient of 0.5 M sucrose in the extraction buffer was used. The purified microsomes were resuspended in the extraction buffer supplemented with 10% (w/v) glycerol as cryoprotectant. Microsomal preparations were stored in a liquid nitrogen freezer until use.

[0294] B. Protein Concentration Determination

[0295] Microsomal proteins were precipitated with 10% Trichloroacetic Acid (TCA) (w/v) in acetone, and the protein concentrations of microsomes were determined using RC DC Protein Assay Kit (BIO-RAD) following the manufacturer's protocol.

3. Nicotine Demethylase Activity Assay

[0296] DL-Nicotine (Pyrrolidine-2-¹⁴C) was obtained from Moravek Biochemicals and had a specific activity of 54 mCi/mmol. Chlorpromazine (CPZ) and oxidized cytochrome c (cyt. C), both P450 inhibitors, were purchased from Sigma. Reduced form of nicotinamide adenine dinucleotide phosphate (NADPH) is the typical electron donor for cytochrome P450 via the NADPH:cytochrome P450 reductase. NADPH was omitted for control incubation. Routine enzyme assay consisted of microsomal proteins (around 2 mg/ml), 6 mM NADPH, 55 μM ¹⁴C labeled nicotine. The concentration of CPZ and Cyt. C, when used, was 1 mM and 100 μM, respectively. The reaction was carried at 25° C. for 1 hour and was stopped with addition of 300 μl methanol to each 25 μl reaction mixture. After spinning, 20 μl of the methanol extract was separated with a reverse-phase High Performance Liquid Chromatography (HPLC) system (Agilent) using an Inertsil ODS-3 3μ (150×4.6 mm) column from Varian. The isocratic mobile phase was the mixture of methanol and 50 mM potassium phosphate buffer, pH 6.25, with ratio of 60:40 (v/v) and the flow rate was 1 ml/min. The nornicotine peak, as determined by comparison with authentic non-labeled nornicotine, was collected and subjected to 2900 tri-carb Liquid Scintillation Counter (LSC) (Perkin Elmer) for quantification. The activity of nicotine demethylase is calculated based on the production of ¹⁴C labeled nornicotine over 1 hour incubation.

[0297] Samples were obtained from pairs of Burley converter (line 4407-33) and non-converter (line 4407-25) tobacco lines that were ethylene treated or not. All untreated samples did not have any detectable microsomal nicotine demethylase activity. In contrast, microsomal samples obtained from ethylene treated converter lines were found to contain significant levels of nicotine demethylase activity. The nicotine demethylase activity was shown to be inhibited by P450 specific inhibitors demonstrating the demethylase activity was consistent to a P450 microsomal derived enzyme. A typical set of enzyme assay results obtained for the burley converter tobacco line is shown in the Table VI. In contrast, sample derived from ethylene treated nonconverter tobacco did not contain any nicotine demethylase activity. These results demonstrated that nicotine demethylase activity was induced upon treatment with ethylene in converter lines but not in the corresponding isogenic nonconverter line. Similar results were obtained for an isogenic dark tobacco variety pair, where microsomal nicotine demethylase activity was induced in converter lines and not detectable in nonconverter paired lines. Together these experiments demonstrated that microsomal nicotine demethylase activity is induced upon ethylene treatment in converter lines while not in paired isogenic nonconverter lines. Those genes that are P450 derived genes and are preferentially induced in converter lines relative to paired non-converter lines are candidate genes to encode the nicotine demethylase enzyme.

TABLE VI
DEMETHYLASE ACTIVITY IN MICROSOMES OF
ETHYLENE INDUCED BURLEY CONVERTER
AND NON CONVERTER LINES

| | | Microsomes + | Microsomes + | |
|---|---|---|---|---|
| | Micro- | 1 mM | with 100 μM | Microsomes − |
| Sample | somes | chlorpromazine | cytochrome C | NADPH |
| Converter | 0.6 ± 0.05 | 0.01 ± 0.01 | 0.03 ± 0.05 | 0.03 ± 0.04 |
| | pkat/mg | pkat/mg | pkat/mg | pkat/mg |
| Non- | Not | Not Detected | Not Detected | Not Detected |
| Converter | Detected | | | |

[0298] Numerous modifications and variations in practice of the invention are expected to occur to those skilled in the art upon consideration of the foregoing detailed description of the invention. Consequently, such modifications and variations are intended to be included within the scope of the following claims.

The application's sequence listing, which the Patent Office published only in electronic form, follows.

SEQUENCE LISTING (411 sequences)

SEQ ID NO: 1 - DNA, 207 bp, NICOTIANATABACUM
gcacaacttgctatcaacttggtcacatctatgttgggtcatttgttgcatcattttacatgggctccggccccgggggttaacccggaggatattgacttggaggagagccctggaacagtaacttacatgaaaaatccaatacaagctattccaactccaagattgcctgcacacttgtatggacgtgtgccagtggatatgtaa

SEQ ID NO: 2 - protein, 68 aa, NICOTIANATABACUM
AQLAINLVTSMLGHLLHHFTWAPAPGVNPEDIDLEESPGTVTYMKNPIQAIPTPRLPAHLYGRVPVDM

SEQ ID NO: 3 - DNA, 207 bp, NICOTIANATABACUM
gcacaacttgctatcaacttggtcacatctatgttgggtcatttgttgcatcattttacgtgggctccgcccccgggggttaacccggagaatattgacttggaggagagccctggaacagtaacttacatgaaaaatccaatacaagctattcctactccaagattgcctgcacacttgtatggacgtgtgccagtggatatgtaa

SEQ ID NO: 4 - protein, 68 aa, NICOTIANATABACUM
AQLAINLVTSMLGHLLHHFTWAPPPGVNPENIDLEESPGTVTYMKNPIQAIPTPRLPAHLYGRVPVDM

SEQ ID NO: 5 - DNA, 183 bp, NICOTIANATABACUM
atgaattattcattgcaagtggaacacctttcaattgctcatatgatccaaggtttcagttttgcaactacgaccaatgagcctttggatatgaaacaaggtgtgggtttaactttaccaaagaagactgatgttgaagtgctaattacacctcgccttcctcctacgctttatcaatattaa

SEQ ID NO: 6 - protein, 60 aa, NICOTIANATABACUM
MNYSLQVEHLSIAHMIQGFSFATTTNEPLDMKQGVGLTLPKKTDVEVLITPRLPPTLYQY

SEQ ID NO: 7 - DNA, 132 bp, NICOTIANATABACUM
gcacaacttgctatcaacttggtcacatctatgttgggtcatttgttcatcattttacatgggctccggccccgggggttaacccggaggatattgacttggaggagagccctggaacagtaacttacatga

SEQ ID NO: 8 - protein, 40 aa, NICOTIANATABACUM
AQLAINLVTSMLGHLFIILHGLRPRGLTRRILTWRRALEQ

SEQ ID NO: 9 - DNA, 189 bp, NICOTIANATABACUM
gaaggattggctgttcgaatggttgccttgtcattgggatgtattattcaatgttttgattggcaacgaatcggcgaagaattggttgatatgactgaaggaactggacttactttgcctaaagctcaacctttggtggccaagtgtagcccacgacctaaaatggctaatcttctctctcagatttga

SEQ ID NO: 10 - protein, 62 aa, NICOTIANATABACUM
EGLAVRMVALSLGCIIQCFDWQRIGEELVDMTEGTGLTLPKAQPLVAKCSPRPKMANLLSQI

SEQ ID NO: 11 - DNA, 189 bp, NICOTIANATABACUM
gaaggattggctattcgaatggttgcattgtcattgggatgtattattcaatgctttgattggcaacgacttggggaaggattggttgataagactgaaggaactggacttactttgcctaaagctcaacctttagtggccaagtgtagcccacgacctataatggctaatcttctttctcagatttga

SEQ ID NO: 12 - protein, 62 aa, NICOTIANATABACUM
EGLAIRMVALSLGCIIQCFDWQRLGEGLVDKTEGTGLTLPKAQPLVAKCSPRPIMANLLSQI

SEQ ID NO: 13 - DNA, 183 bp, NICOTIANATABACUM
ataggttttgcgactttagtgacacatctgacttttggtcgcttgcttcaaggttttgattttagtaagccatcaaacacgccaattgacatgacagaaggcgtaggcgttactttgcctaaggttaatcaagttgaagttctaattacccctcgtttaccttctaagctttatttattttga

SEQ ID NO: 14 - protein, 60 aa, NICOTIANATABACUM
IGFATLVTHLTFGRLLQGFDFSKPSNTPIDMTEGVGVTLPKVNQVEVLITPRLPSKLYLF

SEQ ID NO: 15 - DNA, 178 bp, NICOTIANATABACUM
ataggctttgcgactttagtgacacatctgacttttggtcgcttgcttcaaggttttgattttagtaagccatcaaacacgccaattgacatgacagaaggcgtaggcgttactttgcctaaggttaatcaagttgaagttctaattacccctcgtttaccttctaagctttatttat

SEQ ID NO: 16 - protein, 59 aa, NICOTIANATABACUM
IGFATLVTHLTFGRLLQGFDFSKPSNTPIDMTEGVGVTLPKVNQVEVLITPRLPSKLYL

SEQ ID NO: 17 - DNA, 183 bp, NICOTIANATABACUM
ataaattttgcgactttagtgacacatctgacttttggtcgcttgcttcaaggttttgattttagtacgccatcaaacacgccaatagacatgacagaaggcgtaggcgttactttgcctaaggtaaatcaagtggaagttctaattagccctcgtttaccttctaagctttatgtattctga

SEQ ID NO: 18 - protein, 60 aa, NICOTIANATABACUM
INFATLVTHLTFGRLLQGFDFSTPSNTPIDMTEGVGVTLPKVNQVEVLISPRLPSKLYVF

SEQ ID NO: 19 - DNA, 171 bp, NICOTIANATABACUM
attatacttgcattgccaattcttggcatcactttgggacgtttggttcagaactttgagctgttgcctcctccaggccagtcgaagctcgacaccacagagaaaggtggacagttcagtctccacattttgaagcattccaccattgtgttgaaaccaaggtctttctga

SEQ ID NO: 20 - protein, 56 aa, NICOTIANATABACUM
IILALPILGITLGRLVQNFELLPPPGQSKLDTTEKGGQFSLHILKHSTIVLKPRSF

SEQ ID NO: 21 - DNA, 171 bp, NICOTIANATABACUM
attatacttgcattgccaattcttggcattactttgggacgtttggttcagaactttgagctgttgcctcctccaggccagtcgaagctcgacaccacagagaaaggtggacagttcagtctccatattttgaagcattccaccattgtgttgaaaccaaggtcttgctga

SEQ ID NO: 22 - protein, 56 aa, Nicotiana tabacum
IILALPILGITLGRLVQNFELLPPPGQSKLDTTEKGGQFSLHILKHSTIVLKPRSC

SEQ ID NO: 23 - DNA, 172 bp, Nicotiana tabacum
tattgcacttggggttgcatcaatggaacttgcattgtcaaatcttctttatgcatttgattgggagttaccttttggaatgaaaaaagaagacattgacacaaacgccaggcctggaattaccatgcataagaaaaacgaactttatcttatccctaaaaattatctatag

SEQ ID NO: 24 - protein, 63 aa, NICOTIANATABACUM
IALGVASMELALSNLLYAFDWELPFGMKKEDIDTNARPGITMHKKNELYLIPKNYLPSKLYLF

SEQ ID NO: 25 - DNA, 171 bp, NICOTIANATABACUM
attgcacttggggttgcatccatggaacttgctttgtcaaatcttctttatgcatttgattgggagttaccttacggagtgaaaaaagaaaacattgacacaaatgtcaggcctggaattaccatgcataagaaaaacgaactttgccttatccctagaaattatctatag

SEQ ID NO: 26 - protein, 56 aa, NICOTIANATABACUM
IALGVASMELALSNLLYAFDWELPYGVKKENIDTNVRPGITMHKKNELCLIPRNYL

SEQ ID NO: 27 - DNA, 174 bp, NICOTIANATABACUM
ggtattgcacttggggttgcatccatggaacttgctttgtcaaatcttctttatgcatttgattgggagttgccttatggagtgaaaaaagaagacatcgacacaaacgttaggcctggaattgccatgcacaagaaaaacgaactttgccttgtcccaaaaaattatttataa

SEQ ID NO: 28 - protein, 56 aa, NICOTIANATABACUM
IALGVASMELALSNLLYAFDWELPYGVKKEDIDTNVRPGIAMHKKNELCLVPKNYL

SEQ ID NO: 29 - DNA, 201 bp, NICOTIANATABACUM
attgcacttggggttgcatccatggaacttgctttgtcaaatcttctttatgcatttgattgggagttgccttatggagtgaaaaaagaagacatcgacacaaacgttaggcctggaattgccatgcacaagaaaaacgaactttgccttgtcccaaaaaaattatttataaattatattgggacgtggatctcatgctag

SEQ ID NO: 30 - protein, 66 aa, NICOTIANATABACUM
IALGVASMELALSNLLYAFDWELPYGVKKEDIDTNVRPGIAMHKKNELCLVPKKLFINYIGTWISC

SEQ ID NO: 31 - DNA, 183 bp, NICOTIANATABACUM
atttcgtttggtttagctaatgcttatttgccattggctcaattactttatcactttgattgggaactccccactggaatcaaaccaagcgacttggacttgactgagttggttggagtaactgccgctagaaaaagtgacctttacttggttgcgactccttatcaacctcctcaaaactga

SEQ ID NO: 32 - protein, 60 aa, NICOTIANATABACUM
ISFGLANAYLPLAQLLYHFDWELPTGIKPSDLDLTELVGVTAARKSDLYLVATPYQPPQN

SEQ ID NO: 33 - DNA, 183 bp, NICOTIANATABACUM
atttcgtttggcttagctaatgcttatttgccattggctcaattactatatcacttcgattggaaactccctgctggaatcgaaccaagcgacttggacttgactgagttggttggagtaactgccgctagaaaaagtgacctttacttggttgcgactccttatcaacctcctcaaaagtga

SEQ ID NO: 34 - protein, 60 aa, NICOTIANATABACUM
ISFGLANAYLPLAQLLYHFDWKLPAGIEPSDLDLTELVGVTAARKSDLYLVATPYQPPQK

SEQ ID NO: 35 - DNA, 220 bp, NICOTIANATABACUM
atgctatttggtttagctaatgttggacaacctttagctcagttactttatcacttcgattggaaactccctaatggacaaagtcatgagaatttcgacatgactgagtcacctggaatttctgctacaagaaaggatgatcttgttttgattgccactccttatgattcttattaattccagtctatatcatctatatgtactcaataattgtatggga

SEQ ID NO: 36 - protein, 58 aa, NICOTIANATABACUM
MLFGLANVGQPLAQLLYHFDWKLPNGQSHENFDMTESPGISATRKDDLVLIATPYDSY

SEQ ID NO: 37 - DNA, 174 bp, NICOTIANATABACUM
atgctatttggtttagctaatgttggacaacctttagctcagttactttatcacttcgattggaaactccctaatggacaaactcaccaaaatttcgacatgactgagtcacctggaatttctgctacaagaaaggatgatcttattttgattgccactcctgctcattcttga

SEQ ID NO: 38 - protein, 57 aa, Nicotiana tabacum
MLFGLANVGQPLAQLLYHFDWKLPNGQTHQNFDMTESPGISATRKDDLILIATPAHS

SEQ ID NO: 39 - DNA, 177 bp, Nicotiana tabacum
ttattattcggtttagttaatgtaggacatcctttagctcaattgctttatcacttcgattggaagactcttcctgggataagttcagatagtttcgacatgactgaaacagatggagtaactgccggaagaaaggatgatctttgtttaattgctactccttttggtctcaattaa

SEQ ID NO: 40 - protein, 58 aa, NICOTIANATABACUM
LLFGLVNVGHPLAQLLYHFDWKTLPGISSDSFDMTETDGVTAGRKDDLCLIATPFGLN

SEQ ID NO: 41 - DNA, 180 bp, NICOTIANATABACUM
atgtcgtttggtttagttaacactgggcatcctttagctcagttgctctatttctttgactggaaattccctcataaggttaatgcagctgattttcacactactgaaacaagtagagtttttgcagcaagcaaagatgacctctacttgattccaacaaatcacatggagcaagagtag

SEQ ID NO: 42 - protein, 59 aa, NICOTIANATABACUM
MSFGLVNTGHPLAQLLYFFDWKFPHKVNAADFHTTETSRVFAASKDDLYLIPTNHMEQE

SEQ ID NO: 43 - DNA, 180 bp, NICOTIANATABACUM
atgtcgtttggtttagttaacacagggcatcctttagcccagttgctctattgctttgactggaaactccctgacaaggttaatgcaaatgattttcgcactactgaaacaagtagagtttttgcagcaagcaaagatgacctctacttgattcccacaaatcacagggagcaagaatag

SEQ ID NO: 44 - protein, 59 aa, NICOTIANATABACUM
MSFGLVNTGHPLAQLLYCFDWKLPDKVNANDFRTTETSRVFAASKDDLYLIPTNHREQE

SEQ ID NO: 45 - DNA, 183 bp, NICOTIANATABACUM
atgcaatttggtttggctcttgttactctgccattggctcatttgcttcacaattttgattggaaacttcccgaaggaattaatgcaagggatttggacatgacagaggcaaatgggatatctgctagaagagaaaaagatctttacttgattgctactccttatgtatcacctcttgattaa

SEQ ID NO: 46 - protein, 60 aa, NICOTIANATABACUM
MQFGLALVTLPLAHLLHNFDWKLPEGINARDLDMTEANGISARREKDLYLIATPYVSPLD

SEQ ID NO: 47 - DNA, 177 bp, NICOTIANATABACUM
atgacttatgcattgcaagtggaacacctaacaatggcacatttgatccagggtttcaattacagaactccaactgatgagcccttggatatgaaagaaggtgcaggcataactatacgtaaggtaaatcctgtgaaagtgataattacgcctcgcttggcacctgagctttattaa

SEQ ID NO: 48 - protein, 58 aa, NICOTIANATABACUM
MTYALQVEHLTMAHLIQGFNYRTPTDEPLDMKEGAGITIRKVNPVKVIITPRLAPELY

SEQ ID NO: 49 - DNA, 177 bp, NICOTIANATABACUM
atgacttatgcattgcaagtggaacacctaacaatggcacatttaatccagggtttcaattacaaaactccaaatgacgaggccttggatatgaaggaaggtgcaggcataactatacgtaaggtaaatcctgtggaactgataatagcgcctcgcctggcacctgagctttattaa

SEQ ID NO: 50 - protein, 58 aa, NICOTIANATABACUM
MTYALQVEHLTMAHLIQGFNYKTPNDEALDMKEGAGITIRKVNPVELIIAPRLAPELY

SEQ ID NO: 51 - DNA, 177 bp, NICOTIANATABACUM
atgacttatgcattgcaagtggaacacctaacaatggcacatttaatccagggtttcaattacaaaactccaaatgacgaggccttggatatgaaggaaggtgcaggcataacaatacgtaaggtaaatccagtggaattgataataacgcctcgcttggcacctgagctttactaa

SEQ ID NO: 52 - protein, 58 aa, NICOTIANATABACUM
MTYALQVEHLTMAHLIQGFNYKTPNDEALDMKEGAGITIRKVNPVELIITPRLAPELY

SEQ ID NO: 53 - DNA, 177 bp, NICOTIANATABACUM
atgacttatgcattgcaagtggaacacttaacaatggcacatttgatccaaggtttcaattacagaactccaaatgacgagcccttggatatgaaggaaggtgcaggcataactatacgtaaggtaaatcctgtggaactgataatagcgcctcgcctggcacctgagctttattaa

SEQ ID NO: 54 - protein, 58 aa, NICOTIANATABACUM
MTYALQVEHLTMAHLIQGFNYRTPNDEPLDMKEGAGITIRKVNPVELIIAPRLAPELY

SEQ ID NO: 55 - DNA, 174 bp, NICOTIANATABACUM
atgacttatgcattgcaagtggaacacttaacaatggcacatttgatccaaggtttcaattacagaactccaaatgacgagcccttggatatgaaggaaggtgcaggcataactatacgtaaggtaaatcctgtggaactgataatagcgcccctggcacctgagctttattaa

SEQ ID NO: 56 - protein, 57 aa, NICOTIANATABACUM
MTYALQVEHLTMAHLIQGFNYRTPNDEPLDMKEGAGITIRKVNPVELIIAPLAPELY

SEQ ID NO: 57 - DNA, 177 bp, NICOTIANATABACUM
atgacttatgcattgcaagtggaacacttaacaatggcacatttgatccaaggtttcaattacagaactccaaatgacgagcccttggatatgaaggaaggtgcaggcataactatacgtaaggtaaatcctgcggaactgataatagcgcctcgcctggcacctgagctttattaa

SEQ ID NO: 58 - protein, 58 aa, NICOTIANATABACUM
MTYALQVEHLTMAHLIQGFNYRTPNDEPLDMKEGAGITIRKVNPAELIIAPRLAPELY

SEQ ID NO: 59 - DNA, 177 bp, NICOTIANATABACUM
atgacttatgcattacaagtggaacacctaacaatagcacatttgatccagggtttcaattacaaaactccaaatgacgagcccttggatatgaaggaaggtgcaggattaaccatacgtaaagtaaatcctgtagaagtgacaactacggctcgcctggcacctgagctttattaa

SEQ ID NO: 60 - protein, 58 aa, NICOTIANATABACUM
MTYALQVEHLTIAHLIQGFNYKTPNDEPLDMKEGAGLTIRKVNPVEVTTTARLAPELY

SEQ ID NO: 61 - DNA, 177 bp, NICOTIANATABACUM
atgacttatgcattacaagtggaacacctaacaatagcacatttgatccagggtttcaattacaaaactccaaatgacgagcccttggatatgaaggaaggtgcaggattaactatacgtaaagtaaatcctgtagaagtgacaattacggctcgcctggcacctgagctttattaa

SEQ ID NO: 62 - protein, 58 aa, NICOTIANATABACUM
MTYALQVEHLTIAHLIQGFNYKTPNDEPLDMKEGAGLTIRKVNPVEVTITARLAPELY

SEQ ID NO: 63 - DNA, 177 bp, NICOTIANATABACUM
atgacttatgcattacaagtggaacacctaacaatagcacatttgatccagggtttcaattacaaaactccaaatgacgagcccctggatatgaaggaaggtgcaggattaactatacgtaaagtaaatcctgtagaagtgacaattacggctcgcctggcacctgagctttattaa

SEQ ID NO: 64 - protein, 58 aa, NICOTIANATABACUM; identical to SEQ ID NO: 62

SEQ ID NO: 65 - DNA, 198 bp, NICOTIANATABACUM
tatagccttggacttaaggttatccgagtaacattagccaacatgttgcatggattcaactggaaattacctgaaggtatgaagccagaagatataagtgtggaagaacattatgggctcactacacatcctaagtttcctgttcctgtgatcttggaatctagactttcttcagatctctattcccccatcacttaa

SEQ ID NO: 66 - protein, 65 aa, NICOTIANATABACUM
YSLGLKVIRVTLANMLHGFNWKLPEGMKPEDISVEEHYGLTTHPKFPVPVILESRLSSDLYSPIT

SEQ ID NO: 67 - DNA, 190 bp, NICOTIANATABACUM
atacagtcttgggattcgtataattagggcaactttagctaacttgttgcatggattcaactggagattgcctaatggtatgagtccagaagacattagcatggaagagatttatgggctaattacacaccccaaagtcgcacttgacgtgatgatggagcctcgacttcccaaccatctttacaaatag

SEQ ID NO: 68 - protein, 62 aa, NICOTIANATABACUM
YSLGIRIIRATLANLLHGFNWRLPNGMSPEDISMEEIYGLITHPKVALDVMMEPRLPNHLYK

SEQ ID NO: 69 - DNA, 174 bp, NICOTIANATABACUM
attaatttttcaataccacttgttgagcttgcacttgctaatctattgtttcattataattggtcacttcctgaagggatgctagctaaggatgttgatatggaagaagctttggggattaccatgcacaagaaatctcccctttgcttagtagcttctcattatacttgttga

SEQ ID NO: 70 - protein, 57 aa, NICOTIANATABACUM
INFSIPLVELALANLLFHYNWSLPEGMLAKDVDMEEALGITMHKKSPLCLVASHYTC

SEQ ID NO: 71 - DNA, 190 bp, NICOTIANATABACUM
atgcaacttgggctttatgcattggaaatggctgtggcccatcttcttcattgttttacttgggaattgccagatggtatgaaaccaagtgagcttaaaatggatgatatttttggactcactgctccaaaagctaatcgactcgtggctgtgcctactccacgtttgttgtgtcccctttattaattga

SEQ ID NO: 72 - protein, 61 aa, NICOTIANATABACUM
MQLGLYALEMAVAHLLHCFTWELPDGMKPSELKMDDIFGLTAPKANRLVAVPTPRLLCPLY

SEQ ID NO: 73 - DNA, 186 bp, NICOTIANATABACUM
atgcaacttgggctttatgcattagaaatggcagtggcccatcttcttctttgctttacttgggaattgccagatggtatgaaaccaagtgagcttaaaatggatgatatttttggactcactgctccaagagctaatcgactcgtggctgtgcctagtccacgtttgttgtgcccactttattaa

SEQ ID NO: 74 - protein, 61 aa, NICOTIANATABACUM
MQLGLYALEMAVAHLLLCFTWELPDGMKPSELKMDDIFGLTAPRANRLVAVPSPRLLCPLY

SEQ ID NO: 75 - DNA, 186 bp, NICOTIANATABACUM
atgcaacttgggctttatgcattggaaatggctgtggcccatcttcttcattgttttacttgggaattgccagatggtatgaaaccaagtgagcttaaaatggatgatatttttggactcactgctccaagagctaatcgactcgtggctgtgcctactccacgtttgttgtgtcccctttattaa

SEQ ID NO: 76 - protein, 61 aa, NICOTIANATABACUM
MQLGLYALEMAVAHLLHCFTWELPDGMKPSELKMDDIFGLTAPRANRLVAVPTPRLLCPLY

SEQ ID NO: 77 - DNA, 93 bp, NICOTIANATABACUM
atgctttggagtgcgagtatagtgcgcgtcagctacctaacttgtatttatagattccaagtatatgctgggtctgtgttcagagtagcatga

SEQ ID NO: 78 - protein, 30 aa, NICOTIANATABACUM
MLWSASIVRVSYLTCIYRFQVYAGSVFRVA

SEQ ID NO: 79 - DNA, 93 bp, NICOTIANATABACUM; identical to SEQ ID NO: 77

SEQ ID NO: 80 - protein, 30 aa, NICOTIANATABACUM; identical to SEQ ID NO: 78

SEQ ID NO: 81 - DNA, 93 bp, NICOTIANATABACUM
atgctttggagtgcgagtatagtgcgcgtcagctacctaacctgtatttatagattccaagtatatgctgggtctgtgttcagagtagcatga

SEQ ID NO: 82 - protein, 30 aa, NICOTIANATABACUM; identical to SEQ ID NO: 78

SEQ ID NO: 83 - DNA, 177 bp, NICOTIANATABACUM
attaatttttcaataccacttgttgagcttgcacttgctaatctattgtttcattataattggtcacttcctgaggggatgctacctaaggatgttgatatggaagaagctttggggattaccatgcacaagaaatctcccctttgcttagtagcttctcattataacttgttgtga

SEQ ID NO: 84 - protein, 58 aa, NICOTIANATABACUM
INFSIPLVELALANLLFHYNWSLPEGMLPKDVDMEEALGITMHKKSPLCLVASHYNLL

SEQ ID NO: 85 - DNA, 183 bp, NICOTIANATABACUM
atatcatttggtttggctaatgtttatttgccactagctcaattgttatatcattttgattggaaactccctactggaatcaattcaagtgacttggacatgactgagtcgtcaggagtaacttgtgctagaaagagtgatttatacttgactgctactccatatcaactttctcaagagtga

SEQ ID NO: 86 - protein, 61 aa, NICOTIANATABACUM
GISFGLANVYLPLAQLLYHFDWKLPTGINSSDLDMTESSGVTCARKSDLYLTATPYQLSQE

SEQ ID NO: 87 - DNA, 93 bp, NICOTIANATABACUM
atgctttggagtgcgagtatagtgcgcgtcagctacctaacttgtatttatagattccaagtatatgctgggtctgtgtccagagtagcatga

SEQ ID NO: 88 - protein, 30 aa, NICOTIANATABACUM
MLWSASIVRVSYLTCIYRFQVYAGSVSRVA

SEQ ID NO: 89 - DNA, 153 bp, NICOTIANATABACUM
ctgaattttgcaatgttagaggcaaaaatggcacttgcattgattctacaacactatgcttttgagctctctccatcttatgcacatgctcctcatacaattatcactctgcaacctcaacatggtgctcctttgattttgcgcaagctgtag

SEQ ID NO: 90 - protein, 50 aa, NICOTIANATABACUM
LNFAMLEAKMALALILQHYAFELSPSYAHAPHTIITLQPQHGAPLILRKL

SEQ ID NO: 91 - DNA, 153 bp, NICOTIANATABACUM
ctgaattttgcaatgttagaggcaaaaatggcacttgcattgattctacaacactatgcttttgagctctctccatcttatgcacacgctcctcatacaattatcactctgcaacctcaacatggtgctcctttgattttgcgcaagctgtag

SEQ ID NO: 92 - protein, 50 aa, NICOTIANATABACUM; identical to SEQ ID NO: 90

SEQ ID NO: 93 - DNA, 226 bp, NICOTIANATABACUM
aataattttgcaatgttggaaactaagattgccttagcaatgatcctacagcgttttgctttcgagctttctccatcttacgctcatgcacctacttatgtcgtcactcttcgacctcagtgtggtgctcacttaatcttgcaaaaattataggtccttaatctggatttcccattattgagtagtgcctaataaatcttctctatcactatttttccatctttca

SEQ ID NO: 94 - protein, 50 aa, NICOTIANATABACUM
NNFAMLETKIALAMILQRFAFELSPSYAHAPTYVVTLRPQCGAHLILQKL

SEQ ID NO: 95 - DNA, 268 bp, NICOTIANATABACUM
agcgaaggggtggcaaaggcaacaaaggggaaaatgacatattttccatttggtgcaggaccgcgaaaatgcattgggcaaaacttcgcgattttggaagcaaaaatggctatagctatgattctacaacgcttctccttcgagctctccccatcttatacacactctccatacactgtggtcactttgaaacccaaatatggtgctcccctaataatgcacaggctgtagtcctgtgagaatatgctatccgaggaattcagttcct

SEQ ID NO: 96 - protein, 50 aa, NICOTIANATABACUM
QNFAILEAKMAIAMILQRFSFELSPSYTHSPYTVVTLKPKYGAPLIMHRL

SEQ ID NO: 97 - DNA, 237 bp, NICOTIANATABACUM
agcgaaggggtggcaaaggcaacaaaggggaaaatgacatattttccatttggtgcaggaccgcgaaaatgcattgggcaaaacttcgcgattttggaagcaaaaatggctatagctatgattctacaacgcttctccttcgagctctctccatcttatacacactctccatacactgtggtcactttgaaacccaaatatggtgctcccctaataatgcacaggctgtagtcctgt

SEQ ID NO: 98 - protein, 50 aa, NICOTIANATABACUM; identical to SEQ ID NO: 96

SEQ ID NO: 99 - DNA, 152 bp, NICOTIANATABACUM
caaaattttgccatgttagaagcaaagatggctctgtctatgatcctgcaacgcttctcttttgaactgtctccgtcttatgcacatgcccctcagtccatattaaccgtcagccacaatatggtgctccacttattttccacaagctataa

SEQ ID NO: 100 - protein, 50 aa, NICOTIANATABACUM
QNFAMLEAKMALSMILQRFSFELSPSYAHAPQSILTVQPQYGAPLIFHKL

SEQ ID NO: 101 - DNA, 153 bp, NICOTIANATABACUM
ataaactttgcaatgacagaagcgaagatggctatggctatgattctgcaacgcttctcctttgagctatctccatcttacacacatgctccacagtctgtaataactatgcaaccccaatatggtgctcctcttatattgcacaaattgtaa

SEQ ID NO: 102 - protein, 50 aa, NICOTIANATABACUM
INFAMTEAKMAMAMILQRFSFELSPSYTHAPQSVITMQPQYGAPLILHKL

SEQ ID NO: 103 - DNA, 201 bp, NICOTIANATABACUM
  misc_feature (162)..(162): n is a, c, g, or t
  misc_feature (166)..(166): n is a, c, g, or t
  misc_feature (174)..(174): n is a, c, g, or t
ataaactttgcaatggcagaagcgaagatggctatggctatgattctgcaacgcttctcctttgagctatctccatcttacacacatgctccacagtctgtaataactatgcaaccccaatatggtgctcctcttatattgcacaaattgtaasddaaartnctanatabacmnamaakmamamrsssythasvtmygahk

SEQ ID NO: 104 - protein, 50 aa, Nicotiana tabacum
INFAMAEAKMAMAMILQRFSFELSPSYTHAPQSVITMQPQYGAPLILHKL

SEQ ID NO: 105 - DNA, 153 bp, NICOTIANATABACUM
caaaactttgcaatgatggaagcaaaaatggcagtagctatgatactacaaaaattttcctttgaactatccccttcttatacacatgctccatttgcaattgtgactattcatcctcagtatggtgctcctctgcttatgcgcagactttaa

SEQ ID NO: 106 - protein, 50 aa, NICOTIANATABACUM
QNFAMMEAKMAVAMILQKFSFELSPSYTHAPFAIVTIHPQYGAPLLMRRL

SEQ ID NO: 107 - DNA, 153 bp, NICOTIANATABACUM
caaaactttgcaatgatggaagcaaaaatggcagtagctatgatactacataaattttcctttgaactatccccttcttatacacatgctccatttgcaattgtgactattcatcctcagtatggtgctcctctgcttatgcgcagactttaa

SEQ ID NO: 108 - protein, 49 aa, NICOTIANATABACUM
QNFAMMEAKMAVAMILHKFSFELPSYTHAPFAIVTIHPQYGAPLLMRRL

SEQ ID NO: 109 - DNA, 150 bp, NICOTIANATABACUM
caaaattttgctatgttagaggctaaaatggcaatggctatgattctgaaaacctatgcatttgaactctctccatcttatgctcatgctcctcatccactactacttcaacctcaatatggtgctcaattaattttgtacaagttgtag

SEQ ID NO: 110 - protein, 49 aa, NICOTIANATABACUM
QNFAMLEAKMAMAMILKTYAFELSPSYAHAPHPLLLQPQYGAQLILYKL

SEQ ID NO: 111 - DNA, 192 bp, NICOTIANATABACUM
tatagcatggggctcaaggcgattcaagctagcttagctaatcttctacatggatttaactggtcattgcctgataatatgactcctgaggacctcaacatggatgagatttttgggctctctacacctaaaaaatttccacttgctactgtgattgagccaagactttcaccaaaactttactctgtttga

SEQ ID NO: 112 - protein, 63 aa, NICOTIANATABACUM
YSMGLKAIQASLANLLHGFNWSLPDNMTPEDLNMDEIFGLSTPKKFPLATVIEPRLSPKLYSV

SEQ ID NO: 113 - DNA, 192 bp, NICOTIANATABACUM
tatagcttggggctcaaggagattcaagctagcttagctaatcttctacatggatttaactggtcattgcctgataatatgactcctgaggacctcaacatggatgagatttttgggctctctacacctaaaaaatttccacttgctactgtgattgagccaagactttcaccaaaactttactctgtttga

SEQ ID NO: 114 - protein, 63 aa, NICOTIANATABACUM
YSLGLKEIQASLANLLHGFNWSLPDNMTPEDLNMDEIFGLSTPKKFPLATVIEPRLSPKLYSV

SEQ ID NO: 115 - DNA, 192 bp, NICOTIANATABACUM
catagcttggggctcaaggtgattcaagctagcttagctaatcttctacatggatttaactggtcattgcctgataatatgactcctgaggacctcaacatggatgagatttttgggctctctacacctaaaaaatttccacttgctactgtgattgagccaagactttcaccaaaactttactctgtttga

SEQ ID NO: 116 - protein, 63 aa, NICOTIANATABACUM
HSLGLKVIQASLANLLHGFNWSLPDNMTPEDLNMDEIFGLSTPKKFPLATVIEPRLSPKLYSV

SEQ ID NO: 117 - DNA, 96 bp, NICOTIANATABACUM
ctgtgctttccatgtttaatctctagttatatactggctttgaatgtgaatctgtatcataatttcttgcaaatttctccttccatttcttattaa

SEQ ID NO: 118 - protein, 31 aa, NICOTIANATABACUM
LCFPCLISSYILALNVNLYHNFLQISPSISY

SEQ ID NO: 119 - DNA, 192 bp, NICOTIANATABACUM
tctggacttgctcaatgtgtggttggtttagctttagcaactctagtgcagtgttttgagtggaaaagggtaagcgaagaggtggttgatttgacggaaggaaaaggtctcactatgccaaaacccgagccactcatggctaggtgcgaagctcgtgacatttttcacaaagttctttcagaaatatcttaa

SEQ ID NO: 120 - protein, 63 aa, NICOTIANATABACUM
SGLAQCVVGLALATLVQCFEWKRVSEEVVDLTEGKGLTMPKPEPLMARCEARDIFHKVLSEIS

SEQ ID NO: 121 - DNA, 174 bp, NICOTIANATABACUM
ttgggcttggcaacggtgcatgtgaatttgatgttggcccgaatgattcaagaatttgaatggtccgcttacccggaaaataggaaagtggattttactgagaaattggaatttactgtggtgatgaaaaatcctttaagagctaaggtcaagccaagaatgcaagtggtgtaa

SEQ ID NO: 122 - protein, 57 aa, NICOTIANATABACUM
LGLATVHVNLMLARMIQEFEWSAYPENRKVDFTEKLEFTVVMKNPLRAKVKPRMQVV

SEQ ID NO: 123 - DNA, 171 bp, NICOTIANATABACUM
tatgctttggctatgcttcatttagagtactttgtggctaatttggtttggcattttcgatgggaggctgtggagggagatgatgttgatctttcagaaaagctagaattcaccgttgtgatgaagaatccacttcgagctcgtatctgccccagagttaactctatttga

SEQ ID NO: 124 - protein, 56 aa, NICOTIANATABACUM
YALAMLHLEYFVANLVWHFRWEAVEGDDVDLSEKLEFTVVMKNPLRARICPRVNSI

SEQ ID NO: 125 - DNA, 186 bp, NICOTIANATABACUM
ggtcagcaagttggacttcttagaacaaccattttcatcgcctcattactgtctgaatataagctgaaacctcgctcacaccagaaacaagttgaactcaccgatttaaatccagcaagttggcttcattcgataaaaggcgaactgttagtcgatgcgattcctcgaaagaaggcggcattttaa

SEQ ID NO: 126 - protein, 61 aa, NICOTIANATABACUM
GQQVGLLRTTIFIASLLSEYKLKPRSHQKQVELTDLNPASWLHSIKGELLVDAIPRKKAAF

SEQ ID NO: 127 - DNA, 171 bp, NICOTIANATABACUM
atcacatttgctaagtttgtgaatgagctagcattggcaagattaatgttccattttgatttctcgctaccaaaaggagttaagcatgaggatttggacgtggaggaagctgctggaattactgttagaaggaagttcccccttttagccgtcgccactccatgctcgtga

SEQ ID NO: 128 - protein, 56 aa, NICOTIANATABACUM
ITFAKFVNELALARLMFHFDFSLPKGVKHEDLDVEEAAGITVRRKFPLLAVATPCS

SEQ ID NO: 129 - DNA, 180 bp, NICOTIANATABACUM
cagaggtatgctataaaccatttgatgctctttattgcgttgttcacggctctgattgatttcaagaggcacaaaacggacggctgtgatgatatcgcgtatattccaaccattgctccaaaggatgattgtaaagtgttcctttcacagaggtgcactcgattcccatctttttcatga

SEQ ID NO: 130 - protein, 59 aa, NICOTIANATABACUM
QRYAINHLMLFIALFTALIDFKRHKTDGCDDIAYIPTIAPKDDCKVFLSQRCTRFPSFS

SEQ ID NO: 131 - DNA, 183 bp, NICOTIANATABACUM
atgtcatttggtttagctaatctttacttaccattggctcaattactctatcactttgactggaaactcccaaccggaatcaagccaagagacttggacttgaccgaattatcgggaataactattgctagaaagggtgacctttacttaaatgctactccttatcaaccttctcgagagtaa

SEQ ID NO: 132 - protein, 60 aa, NICOTIANATABACUM
MSFGLANLYLPLAQLLYHFDWKLPTGIKPRDLDLTELSGITIARKGDLYLNATPYQPSRE

SEQ ID NO: 133 - DNA, 174 bp, NICOTIANATABACUM
ttgggcttggcaacggtgcatgtgaatttgatgttggcccgaacgattcaagaatttgaatggtccgcttacccggaaaataggaaagtggattttactgagaaattggaatttactgtggtgatgaaaaaccctttaagagctaaggtcaagccaagaatgcaagtggtgtaa

SEQ ID NO: 134 - protein, 57 aa, NICOTIANATABACUM
LGLATVHVNLMLARTIQEFEWSAYPENRKVDFTEKLEFTVVMKNPLRAKVKPRMQVV

SEQ ID NO: 135 - DNA, 123 bp, NICOTIANATABACUM
ttgggcttggcaacggtgcatgtgaatttgatgttggcccgaatgattcaagaatttgaatggtccgcttacccggaaaataggaaagtggatttactgagaaattggaatttactgtggtga

SEQ ID NO: 136 - protein, 40 aa, NICOTIANATABACUM
LGLATVHVNLMLARMIQEFEWSAYPENRKVDLLRNWNLLW

SEQ ID NO: 137 - DNA, 171 bp, NICOTIANATABACUM
atcacatttgctaagtttgtgaatgagctagcattggcaagattaatgttccattttgatttctcgctaccaaaaggagttaagcatgaggatttggacgtggaggaagctgctggaattactgttaggaggaagttcccccttttagccgtcgccactccatgctcgtga

SEQ ID NO: 138 - protein, 56 aa, NICOTIANATABACUM; identical to SEQ ID NO: 128

SEQ ID NO: 139 - DNA, 171 bp, NICOTIANATABACUM
atcacatttgctaagtttgtgaatgagctagcattggcaagattaatgttccattttgatttctcgctaccaaaaggagttaagcatgcggatttggacgtggaggaagctgctggaattactgttagaaggaagttcccccttttagccgtcgccactccatgctcgtga

SEQ ID NO: 140 - protein, 56 aa, NICOTIANATABACUM
ITFAKFVNELALARLMFHFDFSLPKGVKHADLDVEEAAGITVRRKFPLLAVATPCS

SEQ ID NO: 141 - DNA, 153 bp, NICOTIANATABACUM
caaaattttgccatgttagaagcaaagactactttggctatgatcctacaacgcttctcctttgaactgtctccatcttatgcacatgctcctcagtccataataactttgcaaccccagtatggtgctccacttattttgcataaaatatag

SEQ ID NO: 142 - protein, 50 aa, NICOTIANATABACUM
QNFAMLEAKTTLAMILQRFSFELSPSYAHAPQSIITLQPQYGAPLILHKI

SEQ ID NO: 143 - DNA, 171 bp, NICOTIANATABACUM
attatccttgcactgccaattcttggcattaccttgggacgcttggtgcagaactttgagttgttgcctcctccaggacagtcaaagcttgacacaacagagaaaggcgggcaattcagtctgcacattttgaagcattccaccattgtgatgaaaccaagatctttttaa

SEQ ID NO: 144 - protein, 56 aa, NICOTIANATABACUM
IILALPILGITLGRLVQNFELLPPPGQSKLDTTEKGGQFSLHILKHSTIVMKPRSF

SEQ ID NO: 145 - DNA, 267 bp, NICOTIANATABACUM
caaaattttgccatgttagaagcaaagactactttggctatgatcctacaacgcttctcctttgaactgtctccatcttatgcacatgctcctcagtccataataacttgcaaccccagtatggtgctccacttattttgcataaaatatagtttattacttgtaagtagtgtctcgttttatgttaagcatgagtccaaaatgttaaggcttgtagaactgcaaaatgggaatgcatttgcactcgtgcactgtagattgttgtaa

SEQ ID NO: 146 - protein, 88 aa, NICOTIANATABACUM
QNFAMLEAKTTLAMILQRFSFELSPSYAHAPQSIITCNPSMVLHLFCIKYSLLLVSSVSFYVKHESKMLRLVELQNGNAFALVHCRLL

SEQ ID NO: 147 - DNA, 186 bp, NICOTIANATABACUM
gctgatatggggttgcgagcagtttctttggcattaggtgcacttattcaatgctttgactggcaaattgaggaagcggaaagcttggaggaaagctataattctagaatgactatgcagaacaagcctttgaaggttgtctgcactccacgcgaagatcttggccagcttctatcccaactctaa

SEQ ID NO: 148 - protein, 61 aa, NICOTIANATABACUM
ADMGLRAVSLALGALIQCFDWQIEEAESLEESYNSRMTMQNKPLKVVCTPREDLGQLLSQL

SEQ ID NO: 149 - DNA, 1576 bp, NICOTIANATABACUM
cttccttcctaagtcctaactaaaaatggagattcagttttctaacttagttgcattcttgctctttctctccagcatctttcttctattcaaaaaatggaaaaccagaaaactaaatttgcctcctggtccatggaaattaccttttattggaagtttacaccatttggctgtggcaggtccacttcctcaccatggcctaaaaaatttagccaaacgctatggtcctcttatgcatttacaacttggacaaattcctacactcatcatatcatcacctcaaatggcaaaagaagtactaaaaactcacgacctcgcttttgccactagaccaaagcttgtcgcggccgacatcattcactacgacagcacggacatagcattttctccgtacggtgaatactggagacaaattcgtaaaatttgcatattggaactcttgagtgccaagatggtcaaattttttagctcgattcgccaagatgagctctcgaagatgctctcatctatacgaacgacacccaatcttacagtcaatcttactgacaaaattttttggtttacgagttcggtaacttgtagatcagctttagggaagatatgtggtgaccaagacaaattgatcatttttatgagggaaataatatcattggcaggtggatttagtattgctgattttttccctacatggaaaatgattcatgatattgatggttcgaaatctaaactggtgaaagcacatcgtaagattgatgaaattttgggaaatgttgttgatgagcacaaaaagaacagagcagatggcaagaagggtaatggtgaatttggtggtgaagatttgattgatgtattgttaagagttagagaaagtggagaagttcaaattcctatcacaaatgacaatatcaaatcaatattaatcgacatgttctctgcaggatctgaaacatcatcgacgactataatttgggcattagctgaaatgatgaagaaaccaagtgttttagcaaaggcacaagctgaagtaaggcaagctttgaaggagaaaaaaggttttcaacagattgatcttgatgagctaaaatatctcaagttagtaatcaaagaaaccttaagaatgcaccctccaattcctctattagttcctagagaatgtatggaggatacaaagattgatggttacaatatacctttcaaaacaagagtcatagttaatgcatgggcaatcggacgagatccagaaagttgggatgaccccgaaagctttatgccagagagatttgagaatagttctattgactttcttggaaatcatcatcagtttataccatttggtgcaggaagaaggatttgtccgggaatgctatttggtttagctaatgttggacaacctttagctcagttactttatcacttcgattggaaactccctaatggacaaagtcatgagaatttcgacatgactgagtcacctggaatttctgctacaagaaaggatgatcttgttttgattgccactccttatgattcttattaagcagtagcagaaataaaaagccggggcaaacagaaaaaa

SEQ ID NO: 150 - protein, 503 aa, NICOTIANATABACUM
MEIQFSNLVAFLLFLSSIFLLFKKWKTRKLNLPPGPWKLPFIGSLHHLAVAGPLPHHGLKNLAKRYGPLMHLQLGQIPTLIISSPQMAKEVLKTHDLAFATRPKLVAADIIHYDSTDIAFSPYGEYWRQIRKICILELLSAKMVKFFSSIRQDELSKMLSSIRTTPNLTVNLTDKIFWFTSSVTCRSALGKICGDQDKLIIFMREIISLAGGFSIADFFPTWKMIHDIDGSKSKLVKAHRKIDEILGNVVDEHKKNRADGKKGNGEFGGEDLIDVLLRVRESGEVQIPITNDNIKSILIDMFSAGSETSSTTIIWALAEMMKKPSVLAKAQAEVRQALKEKKGFQQIDLDELKYLKLVIKETLRMHPPIPLLVPRECMEDTKIDGYNIPFKTRVIVNAWAIGRDPESWDDPESFMPERFENSSIDFLGNHHQFIPFGAGRRICPGMLFGLANVGQPLAQLLYHFDWKLPNGQSHENFDMTESPGISATRKDDLVLIATPYDSY

SEQ ID NO: 151 - DNA, 1581 bp, NICOTIANATABACUM
tccttcttccttcctaagtcctaactaaaaatggagattcagttttctaacttagttgcattcttgctctttctctccagcatctttcttctattcaaaaaatggaaaaccagaaaactaaatttgcctcctggtccatggaaattaccttttattggaagtttacaccatttggctgtggcaggtccacttcctcaccatggcctaaaaaatttagccaaacgctatggtcctcttatgcatttacaacttggacaaattcctacactcatcatatcatcacctcaaatggcaaaagaagtactaaaaactcacgacctcgcttttgccactagaccaaagcttgtcgtggccgacatcattcactacgacagcacggacatagcattttctccgtacggtgaatactggagacaaattcgtaaaatttgcatattggaactcttgagtgccaagatggtcaaattttttagctcgattcgccaagatgagctctcgaagatgctctcatctatacgaacgacacccaatcttacagtcaatcttactgacaaaattttttggtttacgagttcggtaacttgtagatcagctttagggaagatatgtggtgaccaagacaaattgatcatttttatgagggaaataatatcattggcaggtggatttagtattgctgattttttccctacatggaaaatgattcatgatattgatggttcgaaatctaaactggtgaaagcacatcgtaagattgatgaaattttgggaaatgttgttgatgagcacaaaaagaacagagcagatggcaagaagggtaatggtgaatttggtggtgaagatttgattgatgtattgttaagagttagagaaagtggagaagttcaaattcctatcacaaatgacaatatcaaatcaatattaatcgacatgttctctgcgggatctgaaacatcatcgacgactataatttgggcattagctgaaatgatgaagaaaccaagtgttttagcaaaggcacaagctgaagtaaggcaagctttgaaggagaaaaaaggttttcaacagattgatcttgatgagctaaaatatctcaagttagtaatcaaagaaaccttaagaatgcaccctccaattcctctattagttcctagagaatgtatggaggatacaaagattgatggttacaatatacctttcaaaacaagagtcatagttaatgcatgggcaatcggacgagatccagaaagttgggatgaccccgaaagctttatgccagagagatttgagaatagttctattgactttcttggaaatcatcatcagtttataccatttggtgcaggaagaaggatttgtccgggaatgctatttggtttagctaatgttggacaacctttagctcagttactttatcacttcgattggaaactccctaatggacaaagtcatgagaatttcgacatgactgagtcacctggaatttctgctacaagaaaggatgatcttgttttgattgccactccttatgattcttattaagcagtagcagaaataaaaagccggggcaaacagaaaaaa

SEQ ID NO: 152 - protein, 532 aa, NICOTIANATABACUM
MEIQFSNLVAFLLFLSSIFLLFKKWKTRKLNLPPGPWKLPFIGSLHHLAVAGPLPHHGLKNLAKRYGPLMHLQLGQIPTLIISSPQMAKEVLKTHDLAFATRPKLVVADIIHYDSTDIAFSPYGEYWRQIRKICILELLSAKMVKFFSSIRQDELSKMLSSIRTTPNLTVNLTDKIFWFTSSVTCRSALGKICGDQDKLIIFMREIISLAGGFSIADFFPTWKMIHDIDGSKSKLVKAHRKIDEILGNVVDEHKKNRADGKKGNGEFGGEDLIDVLLRVRESGEVQIPITNDNIKSILIDMFSAGSETSSTTIIWALAEMMKKPSVLAKAQAEVRQALKEKKGFQQIDLDELKYLKLVIKETLRMHPPIPLLVPRECMEDTKIDGYNIPFKTRVIVNAWAIGRDPESWDDPESFMPERFENSSIDFLGNHHQFIPFGAGRRICPGMLFGLANVGQPLAQLLYHFDWKLPNGQSHENFDMTESPGISATRKDDLVLIATPYDSYNAMEDABBRGANISMNICTIANATABACM

SEQ ID NO: 153 - DNA, 1538 bp, NICOTIANATABACUM
caactgcagtttgaagataccaactaaccaaaatgcagttcttcagcttggtttccattttcctatttctatcttttctctttttgttaaggaaatggaagaactcgaatagccaaaggaaaaaattgccaccaggtccatggaaactaccaatactaggaagtatgcttcatatggttggtggactaccacaccatgtccttagagatttagccaaaaaatatggaccgcttatgcaccttcaattaggtgaagtttctgcagttgtggttacttctcctgatatggcaaaagaagtactaaaaactcatgacatcgctttcgcgtctaggcctagccttttggccccggagattgtctgttacaataggtctgatcttgcgttttgcccctatggcgattattggagacaaatgcgtaaaatatgtgtcttggaagtgctcagtgccaagaatgttcggacatatagctctattaggcgcgatgaagttcttcgtctccttaattttatccggtcatcttctggtgagcctgttaatattacggaaaggatctttttgttcacaagctccatgacatgtagatcagcgtttgggcaagtattcaaggagcaagacaaatttatacaactaattaaagaagttatactcttagcaggagggtttgatgtggctgacatattcccttcatacaagtctcttcatgtgctcagtggaatgaagggtaagattatgaatgcacaccataaggtagatgctattgttgagaatgtcatcaacgagcacaagaaaaatcttgcaattgggaaaactaatggagcgttaggaggtgaagatttaattgatgttcttctaaaacttatgaatgatggaggccttcaatttcctatcaccaacgacaacatcaaagctataatctttgacatgtttgctgctggaacagagacttcatcgtcaacaattgtgtgggctatggtggaaatggtgaaaaatccaactgtatttgcgaaagctcaagcagaagtaagagatgcatttagagaaaaagaaacttttgatgaaaatgatgtggaggagctaaactatctaaagttagtcattaaagaaactctaagacttcatccaccggttccacttttgctcccaagagaatgtagggaagagacaaatataaacggctacactattcctgtaaagaccaaagtcatggttaatgtttgggcattgggaagagatccaaaatattgggatgatgcagaaacttttaagccagagagatttgagcagtgctctaaggattttgttggtaataattttgaatatcttccatttggtggtggaaggaggatttgtccagggatttcgtttggtttagctaatgcttatttgccattggctcaattactttatcactttgattgggaactccccactggaatcaaaccaagcgacttggacttgactgagttggttggagtaactgccgctagaaaaagtgacctttacttggttgcgactccttatcaacctcctcaaaac

SEQ ID NO: 154 - protein, 502 aa, NICOTIANATABACUM
MQFFSLVSIFLFLSFLFLLRKWKNSNSQRKKLPPGPWKLPILGSMLHMVGGLPHHVLRDLAKKYGPLMHLQLGEVSAVVVTSPDMAKEVLKTHDIAFASRPSLLAPEIVCYNRSDLAFCPYGDYWRQMRKICVLEVLSAKNVRTYSSIRRDEVLRLLNFIRSSSGEPVNITERIFLFTSSMTCRSAFGQVFKEQDKFIQLIKEVILLAGGFDVADIFPSYKSLHVLSGMKGKIMNAHHKVDAIVENVINEHKKNLAIGKTNGALGGEDLIDVLLKLMNDGGLQFPITNDNIKAIIFDMFAAGTETSSSTIVWAMVEMVKNPTVFAKAQAEVRDAFREKETFDENDVEELNYLKLVIKETLRLHPPVPLLLPRECREETNINGYTIPVKTKVMVNVWALGRDPKYWDDAETFKPERFEQCSKDFVGNNFEYLPFGGGRRICPGISFGLANAYLPLAQLLYHFDWELPTGIKPSDLDLTELVGVTAARKSDLYLVATPYQPPQN

SEQ ID NO: 155 - DNA, 1530 bp, NICOTIANATABACUM
aaaagatgtcttcattttccacatcttctgccacttctaattccaaacttccagttcgagaaatcccaggagactatggtttccccttttttggagccataaaagatagatatgactacttctacaacctcggcacagacgaattctttcttaccaaaatgcaaaaatacaactctactgtctttagaaccaacatgccaccaggtccattcattgctaaaaatcccaaagtaattgttctcctcgatgccaaaacatttcccgttcttttcgacaactctaaagtcgaaaaaatgaacgttcttgatggcacgtacgtgccatctactgatttctatggcggatatcgcccgtgtgcttatcttgatccttctgagtcaactcatgccacacttaaagggttctttttatctttaatctcccagcttcataatcaatttattcctttatttagaacctcaatttctggtcttttcgcaaatcttgagaatgagatttcccaaaatggcaaagcgaacttcaacaatatcagcgacattatgtcattcgattttgtttttcgtttgttatgtgacaagaccagtccccatgacacaaatcttggctctaatggaccaaaactctttgatatatggctgttgcctcaacttgctccattgtttagtctaggtctaaaatttgtgccgaactttctggaagatttaatgttgcatacttttcccttgccattttttctagtgagatcgaattaccagaagctttatgatgcttttagcaagcatgccgaaagtacactgaatgaagcagagaagaatgggatcaaaagagacgaagcatgccacaacttagtttttcttgcaggtttcaatgcttatggtgggatgaaagttttattccctgcactgataaagtgggtcgccaatggaggaaagagtttacacactcggctggcaaatgaaatcaggacaattatcaaagaagaatgtgggaccataactctatcagcaatcaacaagatgagtttagtaaaatcagtagtgtatgaagtattaagaattgaacctccagttccattccaatatggtaaagccaaagaagatatcataatccaaagccatgattcaactttcttagtcaagaaaggtgaaatgatctttggatatcagccttttgctacaaaagatccaaagatttttgacaaaccagaggagtttattccggagaggttcatggccgaaggggaaaaattattaaagtatgtgtattggtcaaatgcaagagagacagatgatccaacggtggacaacaaacaatgcccagcgaaaaatcttgtcgtgcttttgtgcaggttgatgttggtggaggttttcatgcgttacgacacattcacagtggagtcaacaaagctctttcttgggtcatcagtaacgttcacgactctggaaaaagcgacatgagtttcagatatcttaattgtaggctgcaaataataatgtggtcattctgcaaattattgtacttgtgctgatg

SEQ ID NO: 156 - protein, 504 aa, NICOTIANATABACUM
MELQSSPFNLISLFLFFSFHFILVKKWNAKIPKLPPGPWRLPFIGSLHHLKGKLPHHNLRDLARKYGPLMYLQLGEIPVVVISSPRVAKAVLKTHDLAFATRPRFMSSDIVFYKSRDISFAPFGDYWRQMRKILTQELLSNKMLKSYSLIRKDELSKLLSSIRLETGSAVNINEKLLWFTSCMTCRLAFGKICNDRDELIMLIREILTLSGGFDVGDLFPSWKLLHNMSNMKARLTNVHHKYDLVMENIINEHQENHAAGIKGNNEFGGEDMIDALLRAKENNELQFPIENDNMKAVILDLFIAGTETSYTAIIWALSELMKHPSVMAKAQAEVRKVFKENENFDENDLDKLPYLKSVIKETLRMHPPVPLLGPRECRDQTEIDGYTVPIKARVMVNAWAIGRDPESWEDPESFKPERFENTSVDLTGNHYQFIPFGSGRRMCPGMSFGLVNTGHPLAQLLYCFDWKLPDKVNANDFRTTETSRVFAASKDDLYLIPTNHREQE

SEQ ID NO: 157 - DNA, 1599 bp, NICOTIANATABACUM
cttcttccaaaaatggagcttcaatcttctcctttcaatttaatttctttgttcctcttcttttcttttctttttattctagtgaagaaatggaatgccaaaatcccaaagttacctccaggtccgtggaggcttccctttattggaagcctccatcacttgaagggaaaacttccacaccataatcttagagatctagcgcgaaaatatggacctctcatgtacttacaactcggagaaattcctgtagttgtaatatcttcgccacgtgtagcaaaagctgtactaaaaactcatgatctcgcttttgcaactagaccacgattcatgtcctcagacattgtgttttacaaaagcagggacatctcttttgccccatttggtgattactggagacagatgcgtaaaatattgactcaggaactcctgagtaacaagatgctcaagtcatatagcttaatccgaaaggatgagctctcgaagctcctctcatcgattcgtttggaaacaggttctgcagtgaacataaatgaaaagcttctctggtttacgagctgcatgacctgtagattagcctttggaaaaatatgcaatgatcgggatgagttgatcatgctaattagggagatattaacattatcaggaggatttgatgtgggtgatttgttcccttcctggaaattacttcataatatgagcaacatgaaagctaggttgacgaatgtacaccacaagtatgatttagttatggagaacatcatcaatgagcaccaagagaatcatgcagcagggataaagggtaacaacgagtttggtggcgaagatatgatcgatgctctactgagggctaaggagaataatgagcttcaatttcctatcgaaaatgacaacatgaaagcagtaattctggacttgtttattgctggaactgaaacttcatatactgcaattatatgggcactatcagaattgatgaagcacccaagtgtgatggccaaggcacaagctgaagtgagaaaagtcttcaaagaaaatgaaaatttcgacgaaaatgatcttgacaagttgccatacttaaaatcagtgattaaagaaacactaaggatgcaccctccagttcctttgttagggcctagagaatgcagggaccaaacagagatcgatggctacactgtacctattaaagctagagttatggttaatgcttgggcgataggaagagatcctgaaagttgggaagatcctgaaagtttcaaaccggagcgatttgaaaatacttctgttgatcttacaggaaatcactatcagttcattcctttcggttcaggaagaagaatgtgtccaggaatgtcgtttggtttagttaacacagggcatcctttagcccagttgctctattgctttgactggaaactccctgacaaggttaatgcaaatgattttcgcactactgaaacaagtagagtttttgcagcaagcaaagatgacctctacttgattcccacaaatcacagggagcaagaatagcttaatttaatggagttcttggaagaattaaagaagaagggctatataggtgagattttttgtatggttgca

SEQ ID NO: 158 - protein, 504 aa, NICOTIANATABACUM
MELQSSPFNLISLFLFFSFLFILVKKWNAKIPKLPPGPWRLPFIGSLHHLKGKLPHHNLRDLARKYGPLMYLQLGEIPVVVISSPRVAKAVLKTHDLAFATRPRFMSSDIVFYKSRDISFAPFGDYWRQMRKILTQELLSNKMLKSYSLIRKDELSKLLSSIRLETGSAVNINEKLLWFTSCMTCRLAFGKICNDRDELIMLIREILTLSGGFDVGDLFPSWKLLHNMSNMKARLTNVHHKYDLVMENIINEHQENHAAGIKGNNEFGGEDMIDALLRAKENNELQFPIENDNMKAVILDLFIAGTETSYTAIIWALSELMKHPSVMAKAQAEVRKVFKENENFDENDLDKLPYLKSVIKETLRMHPPVPLLGPRECRDQTEIDGYTVPIKARVMVNAWAIGRDPESWEDPESFKPERFENTSVDLTGNHYQFIPFGSGRRMCPGMSFGLVNTGHPLAQLLYCFDWKLPDKVNANDFRTTETSRVFAASKDDLYLIPTNHREQE

SEQ ID NO: 159 - DNA, 1564 bp, NICOTIANATABACUM
ctttctttcttgtaccgagatggagtttcaacacttggtttcgttcttgctattcatctccttcatctttcttctaattcaaaaatggaggaaatcgaaaaagctgccacctggtccgtggaggctacctattattggaagtgtgcatcacttgacaagtggagtaccacatcgagttctcagaaatttatcacaaaaatttggcccgatcatgtacttgcagctcggggaagttcccacagtagttgtatcctccccacacatggccaaacaaattttaaaaactcatgacctcgcttttgcatctaggccagaaatcatgatgggaaaaattatttgctacgattgtaaggacattgccttttccccgtatggtgattattggagacatatgcgtaaattgagcaccttggaactacttagtgccaagatggtcaagtccttcagtccaattcgtcaagatgagctctcaagtctcctatcatccattgaatcaatgggaaatttgccaatcaacttagtagaaaaacttttatggtttatgaatgccgcgacatgtaggtcagcatttgggaaagtgtgtaaagatcaaaaagagttgataacattgattcaacgagcagaatcattatctggtggattcgagctggctgatttgttcccttcgaagaagtttctacatggtattagtgggatgcgatctaaactaatggaagctcgtaacaagatagacgcagtcttggacaacattatcaatgtgcacagagagaatcgggcaaatggaaatagttgtaatggtgagtctggaactgtagatttcatcgatgtttttctaagggtcatggagagtggcgaattaccatttccgatagaaaatgacaacatcaaagcagttattcttgacatgttcgtagcaggatctgacacatcatcttcaaccgttatttgggcattaacagaaatgatgaagaatccaaaagtcatggctaaagcacaagctgaagtgagagaagcttttaaaggaaagaaagcatgtgatgaggatactgatcttgaaaagcttcattacctaaatttagtgatcaaagagacactccgattacaccctccaactcctctacttgtcccgcgagaatgcagggaggaaacagagatagaaggattcactataccattgaaaagcaaagtcttggttaacgtatgggcaattggaagagatcccgagaattggaaaaatcctgaatgttttataccagagagattcgaaaatagttctattgagtttactggaaatcattttcaacttcttccgtttggcgctggaagacgaatttgtccaggaatgcaatttggtttggctcttgttactctgccattggctcatttgcttcacaattttgattggaaacttcccgaaggaattaatgcaagggatttggacatgacagaggcaaatgggatatctgctagaagagaaaaagatctttacttgattgctactccttatgtatcacctcttgattaactctgaaattttgctttaatgctgcttgcttgcttcact

SEQ ID NO: 160 - protein, 501 aa, NICOTIANATABACUM
MEFQHLVSFLLFISFIFLLIQKWRKSKKLPPGPWRLPIIGSVHHLTSGVPHRVLRNLSQKFGPIMYLQLGEVPTVVVSSPHMAKQILKTHDLAFASRPEIMMGKIICYDCKDIAFSPYGDYWRHMRKLSTLELLSAKMVKSFSPIRQDELSSLLSSIESMGNLPINLVEKLLWFMNAATCRSAFGKVCKDQKELITLIQRAESLSGGFELADLFPSKKFLHGISGMRSKLMEARNKIDAVLDNIINVHRENRANGNSCNGESGTVDFIDVFLRVMESGELPFPIENDNIKAVILDMFVAGSDTSSSTVIWALTEMMKNPKVMAKAQAEVREAFKGKKACDEDTDLEKLHYLNLVIKETLRLHPPTPLLVPRECREETEIEGFTIPLKSKVLVNVWAIGRDPENWKNPECFIPERFENSSIEFTGNHFQLLPFGAGRRICPGMQFGLALVTLPLAHLLHNFDWKLPEGINARDLDMTEANGISARREKDLYLIATPYVSPLD

SEQ ID NO: 161 - DNA, 1560 bp, NICOTIANATABACUM
ctttcttgtaccgagatggagtttcaacacttggtttcgttcttgctattcatctccttcatctttcttctaattcaaaaatggaggaaatcgaaaaagctgccacctggtccgtggaggctacctattattggaagtgtgcatcacttgacaagtggagtaccacatcgagttctcagaaatttatcacaaaaatttggcccgatcatgtacttgcagctcggggaagttcccacagtagttgtatcctccccacacatggccaaacaaattttaaaaactcatgacctcgcttttgcatctaggccagaaatcatgatgggaaaaattatttgctacgattgtaaggacattgccttttccccgtatggtgattattggagacatatgcgtaaattgagcaccttggaactacttagtgccaagatggtcaagtccttcagtccaattcgtcaagatgagctctcaagtctcctatcatccattgaatcaatgggaaatttgccaatcaacttagtagaaaaacttttatggtttatgaatgccgcgacatgtaggtcagcatttgggaaagtgtgtaaagatcaaaaagagttgataacattgattcaacgagcagaatcattatctggtggattcgagctggctgatttgttcccttcgaagaagtttctacatggtattagtgggatgcgatctaaactaatggaagctcgtaacaagatagacgcagtcttggacaacattatcaatgtgcacagagagaatcgggcaaatggaaatagttgtaatggtgagtctggaactgtagatttcatcgatgtttttctaagggtcatggagagtggcgaattaccatttccgatagaaaatgacaacatcaaagcagttattcttgacatgttcgtagcaggatctgacacatcatcttcaaccgttatttgggcattaacagaaacgatgaagaatccaaaagtcatggctaaagcacaagctgaagtgagagaagcttttaaaggaaagaaagcatgtgatgaggatactgatcttgaaaagcatcattacctaaatttagtgatcaaagagacactccgattacaccctccaactcctctacttgtcccgcgagaatgcagggaggaaacagagatagaaggattcactataccattgaaaagcaaagtcttggttaacgtatgggcaattggaagagatcccgagaattggaaaaatcctgaatgttttataccagagagattcgaaaatagttctattgagtttactggaaatcattttcaacttcttccgtttggcgctggaagacgaatttgtccaggaatgcaatttggtttggctcttgttactctgccattggctcatttgcttcacaattttgattggaaacttcccgaaggaattaatgcaagggatttggacatgacagaggcaaatgggatatctgctagaagagaaaaagatctttacttgattgctactccttatgtatcacctcttgattaactctgaaattttgctttaatgctgcttgcttgcttcact

SEQ ID NO: 162 - protein, 501 aa, NICOTIANATABACUM
MEFQHLVSFLLFISFIFLLIQKWRKSKKLPPGPWRLPIIGSVHHLTSGVPHRVLRNLSQKFGPIMYLQLGEVPTVVVSSPHMAKQILKTHDLAFASRPEIMMGKIICYDCKDIAFSPYGDYWRHMRKLSTLELLSAKMVKSFSPIRQDELSSLLSSIESMGNLPINLVEKLLWFMNAATCRSAFGKVCKDQKELITLIQRAESLSGGFELADLFPSKKFLHGISGMRSKLMEARNKIDAVLDNIINVHRENRANGNSCNGESGTVDFIDVFLRVMESGELPFPIENDNIKAVILDMFVAGSDTSSSTVIWALTETMKNPKVMAKAQAEVREAFKGKKACDEDTDLEKHHYLNLVIKETLRLHPPTPLLVPRECREETEIEGFTIPLKSKVLVNVWAIGRDPENWKNPECFIPERFENSSIEFTGNHFQLLPFGAGRRICPGMQFGLALVTLPLAHLLHNFDWKLPEGINARDLDMTEANGISARREKDLYLIATPYVSPLD

SEQ ID NO: 163 - DNA, 1552 bp, NICOTIANATABACUM
caaaaacaaaattccaatggttaacatgttcactccaattatatacgctcctctccttttagctttttacattatcacaaaacatttcttacgcaaactcagaaataatccaccagctccatttcttactttcccctttattggccatctttatctcttcaaaaaaccacttcaacgtaccttagccaaaatctccgaacgttatggctctgttcttctactcgaattcggttcacgaaaagtacttttggtttcttcaccatctgcagctgaagaatgcttaacaaaaaacgatattattttcgcgaatcgtcctcttttgatggctggaaaacatcttggatataattttacatctttggcttggagttcgtacggagatcattggagaaatctgcgaaggattacttcagttgagatgttttcgactcatcgtcttcaaatgctacatgggattcgtattgatgaagtgaaatctatggttaagaggctcaattcctctgccatagctgaaaaatctgtggatatgaagtctatgttttttgagctgatgctcaatgttatgatgaggacaattgctggaaaaagatattacggtgagaatgtggaggacattgaggaagctacgagattcaaaggtttggtgcaagagactttcaggattggcggggcgacgaatattggcgactttttgccggcgttgaagttattggtgaggaaattggagaaaagtttaattgtgttgcaagagaacagagatgagtttatgcaggaattaattaaagattgcagaaaaagaatggagaaagaaggtactgttactgattcagaaattgaagggaacaagaaatgtttaattgaagttttgttaacactacaagaaaatgaaccggaatactacaaagatgaaatcatcagaagccttatgcttgttctattatcagctggtacagatacttcagttgggacaatggaatgggctttatcattaatgttaaaccaccctgaaactctgaagaaagcacaagctgaaattgatgaacatataggacatgaacgtttagtggacgagtcggacatcaacaacctaccttacctacgttgtataatcaacgagacattccgaatgtaccctgcaggaccactactagtcccacacgagtcgtcagaggaaaccaccgtaggaggctaccgtgtacccggaggaaccatgttacttgtgaatttgtgggcaattcacaatgatccaaagctatgggatgaaccaagaaagtttaaaccagaaagatttcaaggactagatggtgttagagatggttacaaaatgatgccttttggttctggacgaaggagttgtcctggagaaggattggctgttcgaatggttgccttgtcattgggatgtattattcaatgttttgattggcaacgaatcggcgaagaattggttgatatgactgaaggaactggacttactttgcctaaagctcaacctttggtggccaagtgtagcccacgacctaaaatggctaatcttctctctcagatttga

SEQ ID NO: 164 - protein, 511 aa, NICOTIANATABACUM
MVNMFTPIIYAPLLLAFYIITKHFLRKLRNNPPAPFLTFPFIGHLYLFKKPLQRTLAKISERYGSVLLLEFGSRKVLLVSSPSAAEECLTKNDIIFANRPLLMAGKHLGYNFTSLAWSSYGDHWRNLRRITSVEMFSTHRLQMLHGIRIDEVKSMVKRLNSSAIAEKSVDMKSMFFELMLNVMMRTIAGKRYYGENVEDIEEATRFKGLVQETFRIGGATNIGDFLPALKLLVRKLEKSLIVLQENRDEFMQELIKDCRKRMEKEGTVTDSEIEGNKKCLIEVLLTLQENEPEYYKDEIIRSLMLVLLSAGTDTSVGTMEWALSLMLNHPETLKKAQAEIDEHIGHERLVDESDINNLPYLRCIINETFRMYPAGPLLVPHESSEETTVGGYRVPGGTMLLVNLWAIHNDPKLWDEPRKFKPERFQGLDGVRDGYKMMPFGSGRRSCPGEGLAVRMVALSLGCIIQCFDWQRIGEELVDMTEGTGLTLPKAQPLVAKCSPRPKMANLLSQI

SEQ ID NO: 165 - DNA, 1675 bp, NICOTIANATABACUM
caaaaacaaaattccaatggttaacatgttcactccaattatatacgctcctctccttttagctttttacattatcacaaaacatttcttacgcaaactcagaaataacccaccagctccatttcttactttcccctttattggccatctttatctcttcaaaaaaccacttcaacgtaccttagccaaaatctccgaacgttatggctctgttcttctactcgaattcggttcacgaaaagtacttttggtttcttcaccatctgcagctgaagaatgcttaacaaaaaacgatattattttcgcgaatcgtcctcttttgatggctggaaaacatcttggatataattttacttctttggcttggagttcgtacggagatcactggagaaatcttcgtaggattacttcagttgagatgttttcgactcatcgtcttcaaatgctacatggaattcgtattgatgaagtgaaatctatggttaagaggctcaattcctctgccatagctgaaaaatctgtggatatgaagtctatgttttttgagctgatgctcaatgttatgatgaggacaattgctggaaaaagatattacggtgagaatgtggaggacattgaggaagctacgagattcaaaggtttggtgcaagagactttcaggattggcggggcgacgaatattggcgactttttgccggcgttgaagttattggtgaggaaattggagaaaagtttaattgtgttgcaagagaacagagatgagtttatgcaggaattaattaaagattgcagaaaaagaatggagaaagaaggtactgttactgattcagaaattgaagggaacaagaaatgtttaattgaagttttgttaacactacaagaaaatgaaccggaatactacaaagatgaaatcatcagaagccttatgcttgttctattatcagctggtacagatacttcagttgggacaatggaatgggctttatcattaatgttaaaccaccctgaaactctgaagaaagcacaagctgaaattgatgaacatataggacatgaacgtttagtggacgagtcggacatcaacaacctaccttacctacgttgtataatcaacgagacattccgaatgtaccctgcaggaccactactagtcccacacgagtcgtcagaggaaaccaccgtaggaggctaccgtgtacccggaggaaccatgttacttgtgaatttgtgggctattcacaatgatccaaagctatgggatgaaccaagaaagtttaagccagaaagatttgaaggactagaaggtgttagagacggttacaaaatgatgccttttggttctggacgaaggagttgtcctggagaaggattggctattcgaatggttgcattgtcattgggatgtattattcaatgctttgattggcaacgacttggggaaggattggttgataagactgaaggaactggacttactttgcctaaagctcaacctttagtggccaagtgtagcccacgacctataatggctaatcttctttctcagatttgaacataattggtttctaccaaacatccccaaactagaatattattattggttacatatacaatgtaatcaattttgaaccatattatatctcaatgtattcctttttaaaaaaaaaaaaaaaaa

SEQ ID NO: 166 - protein, 511 aa, NICOTIANATABACUM
MVNMFTPIIYAPLLLAFYIITKHFLRKLRNNPPAPFLTFPFIGHLYLFKKPLQRTLAKISERYGSVLLLEFGSRKVLLVSSPSAAEECLTKNDIIFANRPLLMAGKHLGYNFTSLAWSSYGDHWRNLRRITSVEMFSTHRLQMLHGIRIDEVKSMVKRLNSSAIAEKSVDMKSMFFELMLNVMMRTIAGKRYYGENVEDIEEATRFKGLVQETFRIGGATNIGDFLPALKLLVRKLEKSLIVLQENRDEFMQELIKDCRKRMEKEGTVTDSEIEGNKKCLIEVLLTLQENEPEYYKDEIIRSLMLVLLSAGTDTSVGTMEWALSLMLNHPETLKKAQAEIDEHIGHERLVDESDINNLPYLRCIINETFRMYPAGPLLVPHESSEETTVGGYRVPGGTMLLVNLWAIHNDPKLWDEPRKFKPERFEGLEGVRDGYKMMPFGSGRRSCPGEGLAIRMVALSLGCIIQCFDWQRLGEGLVDKTEGTGLTLPKAQPLVAKCSPRPIMANLLSQI

SEQ ID NO: 167 - DNA, 1755 bp, NICOTIANATABACUM
caacacgcttactatctcctaaatctccactcaaaaacaaagaagagaaagatttaaaactaataattatgaaagagatggtgcaaaacaatatgagcacttctcttcttgaaactttacaagctacgcccatgatattctacttcatcgtccctctcttctgcttattccttctctccaaatctcgccgtaaacgtttgcctccaggtccaactggctggcctctcattggtaacatgatgatgatggaccagttaactcaccgtggccttgccaaactagcccaaaaatatggtggtgtttttcaccttaaaatgggttatgttcacaaaattgtagtctctggtccagacgaagctcgccaagtattacaggaacacgacatcatattttcgaaccgtccagcgaccgtagccataagttacctaacatatgacagggcagacatggcttttgctgactatggactcttctggcggcagatgagaaaactatgtgtaatgaaactcttcagccgcaaacgagctgagtcatgggactcagttcgagacgaagcggattccatggttagaattgtaacaaccaacacaggcacagctgttaacttaggtgaacttgttttcagtctcactcgtaatattatctacagagctgcttttggaacttgttctgaagatggacaaggcgagttcattaaaattatgcaagagttttcgaagctatttggtgctttcaatatagctgattttattccatggctagggtgggttggtaagcagagtctaaatattagacttgctaaggctagagcgtcgcttgatgggttcattgattcgattattgatgaccatattattagaaagaaagcttatgttaatggcaaaaatgatggaggtgatcgagaaactgatatggtggatgagcttttagctttttacagtgaggaagcaaaagtaactgagtccgaagatttgcagaatgctatcagacttactaaggataatatcaaagctatcatcatggatgtaatgtttggagggacagaaacagtggcttctgcaatagaatgggccatggcagagcttatgaggagtcctgaagatcttaaaaaggtacaacaagagctggctaacgttgttggactcaacagaaaagttgaagaatctgactttgaaaaattaacatacttaagatgttgtctaaaagaaactctacgacttcaccctccaatccctctcctcctccatgagaccgccgaggaatccaccgtctccggctaccatattccggcaaagtcacatgttattataaattcatttgccattgggcgtgacaaaaattcatgggaagatcctgaaacttataaaccatctaggtttctcaaagaaggtgtaccagattttaaaggaggtaattttgagtttataccatttgggtcgggtcggcggtcttgccccggtatgcaacttgggctttatgcattggaaatggctgtggcccatcttcttcattgttttacttgggaattgccagatggtatgaaaccaagtgagcttaaaatggatgatatttttggactcactgctccaagagctaatcgactcgtggctgtgcctactccacgtttgttgtgtcccctttattaattgaagaaaaaaggtggggcttttacttgcatcaaagagtggtgcttgtgatttttccaccttttggttaaatatacgaattattatgatatacgaattcttgggcaca

SEQ ID NO: 168 - protein, 525 aa, NICOTIANATABACUM
MKEMVQNNMSTSLLETLQATPMIFYFIVPLFCLFLLSKSRRKRLPPGPTGWPLIGNMMMMDQLTHRGLAKLAQKYGGVFHLKMGYVHKIVVSGPDEARQVLQEHDIIFSNRPATVAISYLTYDRADMAFADYGLFWRQMRKLCVMKLFSRKRAESWDSVRDEADSMVRIVTTNTGTAVNLGELVFSLTRNIIYRAAFGTCSEDGQGEFIKIMQEFSKLFGAFNIADFIPWLGWVGKQSLNIRLAKARASLDGFIDSIIDDHIIRKKAYVNGKNDGGDRETDMVDELLAFYSEEAKVTESEDLQNAIRLTKDNIKAIIMDVMFGGTETVASAIEWAMAELMRSPEDLKKVQQELANVVGLNRKVEESDFEKLTYLRCCLKETLRLHPPIPLLLHETAEESTVSGYHIPAKSHVIINSFAIGRDKNSWEDPETYKPSRFLKEGVPDFKGGNFEFIPFGSGRRSCPGMQLGLYALEMAVAHLLHCFTWELPDGMKPSELKMDDIFGLTAPRANRLVAVPTPRLLCPLY

SEQ ID NO: 169 - DNA, 1684 bp, NICOTIANATABACUM
tgtgcttgtgagtgtgggagaaggccttcaatatggagataccatattacagcttaaaaattgcaatttcttcatttgcaattatctttgtactaagatgggcatggaaaatcttgaattatgtgtggttaaaaccaaaagaattggagaaatacctcagacagcagggtttcaaaggaaactcttacaaattcttgtttggggatatgaaagagatgaagaaaatgggtgaagaagctatgtctaagccaatcaatttctctcatgacatgatttggcctagagttatgccattcatccacaaaaccatcaccaattatggtaagaattgtattgtgtggtttgggccaagaccagcagtcctgatcacagacccggaacttgtaaaggaggtgctaacgaagaatttcgtctatcagaagccgcttggcaatccactcacaaagttggcagcaactggaattgcaggctatgaaacagataaatgggctacacatagaaggcttctcaatcctgcttttcaccttgacaagttgaagcatatgctacctgcattccaatttactgctagtgagatgttgagcaaattggagaaagttgtttcaccaaacggaacagagatagatgtgtggccatatttacaaactttgacaagtgatgccatttcaagaactgcgtttggaagtagttatgaagaaggaagaaagatttttgaccttcaaaaagaacaactttcactaattctagaagtttcacgcacaatatatattccaggatggaggtttttgccaacgaaaaggaacaaaaggatgaagcaaatatttaatgaagtacgagcactggtatttggaattattaagaaaaggatgagtatgattgaaaatggagaagcacctgatgatttattgggaatattattggcatccaatttaaaagaaatccaacaacatggaaacaacaagaaatttggtatgagtattgatgaggtgattgaagagtgtaaactcttctattttgctgggcaagagactacttcatctttacttgtatggactatgattttgttgtgcaaatatcctaattggcaagataaagctagagaagaggttttgcaagtgtttgggagtagggaagttgactatgacaagttgaatcagctaaaaatagtaactatgatcttaaacgaggtcttaaggttgtatccagcaggatatgtgattaatcgaatggtaaacaaagaaacaaagttagggaatttgtgtttaccagccggcgtacagctcgtgttaccaacaatgttgttgcaacatgatactgaaatatggggagatgatgcaatggagttcaatccagagagatttagtgatggaatatccaaagcaacaaaaggaaaacttgtgttttttccatttagttggggtccaagaatatgtattgggcaaaattttgctatgttagaggctaaaatggcaatggctatgattctgaaaacctatgcatttgaactctctccatcttatgctcatgctcctcatccactactacttcaacctcaatatggtgctcaattaattttgtacaagttgtagatatggtcaatttggaacttgttatggaacttttatcattgtaatcaaccatattgagggaacatggtttgaggttaaatcctcgtgtgtgtgtc

SEQ ID NO: 170 - protein, 518 aa, NICOTIANATABACUM
MEIPYYSLKIAISSFAIIFVLRWAWKILNYVWLKPKELEKYLRQQGFKGNSYKFLFGDMKEMKKMGEEAMSKPINFSHDMIWPRVMPFIHKTITNYGKNCIVWFGPRPAVLITDPELVKEVLTKNFVYQKPLGNPLTKLAATGIAGYETDKWATHRRLLNPAFHLDKLKHMLPAFQFTASEMLSKLEKVVSPNGTEIDVWPYLQTLTSDAISRTAFGSSYEEGRKIFDLQKEQLSLILEVSRTIYIPGWRFLPTKRNKRMKQIFNEVRALVFGIIKKRMSMIENGEAPDDLLGILLASNLKEIQQHGNNKKFGMSIDEVIEECKLFYFAGQETTSSLLVWTMILLCKYPNWQDKAREEVLQVFGSREVDYDKLNQLKIVTMILNEVLRLYPAGYVINRMVNKETKLGNLCLPAGVQLVLPTMLLQHDTEIWGDDAMEFNPERFSDGISKATKGKLVFFPFSWGPRICIGQNFAMLEAKMAMAMILKTYAFELSPSYAHAPHPLLLQPQYGAQLILYKL

SEQ ID NO: 171 - DNA, 1697 bp, NICOTIANATABACUM
ccagcaccaagacatggagaattcctgggtagttttagccttaacaggccttcttacattagtttttctctcaaagtttcttcatagtcctcgtcgtaaacaaaatcttccaccaggtccaaaaccatggcctattgttggcaatatacatcttcttggttccacccctcacagatcccttcacgaacttgcaaaaagatacggagatttaatgctactaaagttcggttcgcgcaatgtccttattttatcctccccagatatggctagagaattcttgaaaacaaatgatgccatttgggcttctcgccctgagcttgccgctggtaaatatactgcttataattattgcgacatgacatgggcacgttatggacccttttggagacaagcaaggaggatctatctcaacgagattttcaatcctaaacgtttggattcatttgagtacattcgcatagaggaaaggcataatttgatttcacgtctttttgttctctctgggaagccaattcttcttagagaccatttaactcggtacactcttacaagtataagtagaacagtattgagtggaaaatattttagcgagtcacctggccaaaattcaatgataactttgaaacaattgcaggatatgcttgataagtggtttttgcttaatggtgtgatcaatattggggactggataccttggcttgctttcttggatttgcagggttatgtcaagcaaatgaaggagttgcataggaacttcgacaaatttcataactttgtgctagatgatcacaaggctaataggggagagaagaactttgtgccaagagacatggtcgatgttttgctgcagcaagctgaggatcctaatcttgaggtcaaactcaccaatgattgtgtcaagggtctaatgcaggacttattggctggcggcacggacacctcagcaacaaccgttgaatgggctttttatgaacttcttagacaacctaagattatgaagaaagcacaacaagagctagaccttgtcatttcacaggacagatgggttcaagaaaaagattacactcaactcccttacattgagtcaatcatcaaggaaacattgaggcttcacccagtaagcaccatgcttccaccgcgcattgccttggaggattgtcatgtagcaggctatgacatacctaaaggtacaattttaattgtgaacacttggagtattggaagaaattcacagcattgggagtcaccagaagaattccttccggagaggtttgaagggaagaatattggtgtcacaggacaacattttgcgctcttgccatttggcgcgggccggagaaagtgcccaggatacagtcttgggattcgtataattagggcaactttagctaacttgttgcatggattcaactggagattgcctaatggtatgagtccagaagacattagcatggaagagatttatgggctaattacacaccccaaagtcgcacttgacgtgatgatggagcctcgacttcccaaccatctttacaaatagtggataattaaaaccattaaaatcgttttgttatatgcatgtctcatatttgtagtggtcaaaatgtttgttttctatcatggatgttcagtgcgaggttgggaatttcaagtcattaacgtgtgaaaatattttaaatttaaaaaaaaaaaaaaaa

SEQ ID NO: 172 - protein, 508 aa, NICOTIANATABACUM
MENSWVVLALTGLLTLVFLSKFLHSPRRKQNLPPGPKPWPIVGNIHLLGSTPHRSLHELAKRYGDLMLLKFGSRNVLILSSPDMAREFLKTNDAIWASRPELAAGKYTAYNYCDMTWARYGPFWRQARRIYLNEIFNPKRLDSFEYIRIEERHNLISRLFVLSGKPILLRDHLTRYTLTSISRTVLSGKYFSESPGQNSMITLKQLQDMLDKWFLLNGVINIGDWIPWLAFLDLQGYVKQMKELHRNFDKFHNFVLDDHKANRGEKNFVPRDMVDVLLQQAEDPNLEVKLTNDCVKGLMQDLLAGGTDTSATTVEWAFYELLRQPKIMKKAQQELDLVISQDRWVQEKDYTQLPYIESIIKETLRLHPVSTMLPPRIALEDCHVAGYDIPKGTILIVNTWSIGRNSQHWESPEEFLPERFEGKNIGVTGQHFALLPFGAGRRKCPGYSLGIRIIRATLANLLHGFNWRLPNGMSPEDISMEEIYGLITHPKVALDVMMEPRLPNHLYK

SEQ ID NO: 173 - DNA, 1631 bp, NICOTIANATABACUM
actgttcaaatcacagtaacagcatcttgtgctgccataataattactctagtggtgtgtatatggagagtgctgaattgggtttggttcagaccaaagaagctggaaaagctactgaggaaacaaggtctcaaaggcaattcctacaggattttgtatggggatatgaaggagctttctggtatgattaaggaagctaactccaaacccatgaatctttctgatgatattgccccaagattggtccctttctttcttgataccatcaagaaatatgggaaaaaatcctttgtatggttgggtccaaaaccgctggtttttgtcatggaccccgagcttataaaggaagtattctccaaaaactatctgtatcaaaagcctcattcaaatccattaaccaagttactggcacaaggacttgtaagccaagaggaagacaaatgggccaaacatagaaaaatcgtcactcctgccttccacctggagaagctaaagcatatgcttccagctttttgtttgagctgtactgagatgctgagcaaatgggaagacattgttgcagttgagggctcacatgagatagatatatggcctggccttcaacaattaactagtgatgtgatctctcggacagcctttggcagtagctatgaagcaggtagaaggatatttgaacttcaaaaggaacaagctcaatttcttatggaagctatacgctccgtttatattccaggctggaggtttttgccaacaaagaggaacagaagaatgaaggaaattgaaaaggatgttcaagccttagttagaggtattattgataaaagagtaaagtcaatgaaagcaggagaggtgaataatgaggatctgcttggtatattgctggaatctaattttaaagaaattgaacagcatggaaacaaggattttggaatgagcattgaagaagtcattcaagaatgcaagttattctattttgctggccaagaaactacatcagtgttgcttgtatggactctaatattgctgagcaggcatcaggattggcaagcactggccagagaagaggtgttgcaagtctttgggaatcagaaaccagattttgatggattaaatcgtctaaaaattgttacaatgatcttgtacgagtctttaaggctctatcccccagtagtgacacttacccgaaggcctaaggaagacactgtattaggagatgtatctctaccagcaggtgtgttaatctccttaccagtgatcttattgcatcacgacgaagagatatggggtaaagatgcaaagaagttcaagccagagagattcagagatggagtctcaagtgcaacaaagggtcaagtcacttttttcccatttacttggggtcccagaatatgcattggacaaaattttgccatgttagaagcaaagactactttggctatgatcctacaacgcttctcctttgaactgtctccatcttatgcacatgctcctcagtccataataactttgcaaccccagtatggtgctccacttattttgcataaaatatagtttattacttgtaagtagtgtctcgttttatgttaagcatgagtccaaaatgttaaggcttgtagaactgcaaaatggga

SEQ ID NO: 174 - protein, 461 aa, NICOTIANATABACUM
MKELSGMIKEANSKPMNLSDDIAPRLVPFFLDTIKKYGKKSFVWLGPKPLVFVMDPELIKEVFSKNYLYQKPHSNPLTKLLAQGLVSQEEDKWAKHRKIVTPAFHLEKLKHMLPAFCLSCTEMLSKWEDIVAVEGSHEIDIWPGLQQLTSDVISRTAFGSSYEAGRRIFELQKEQAQFLMEAIRSVYIPGWRFLPTKRNRRMKEIEKDVQALVRGIIDKRVKSMKAGEVNNEDLLGILLESNFKEIEQHGNKDFGMSIEEVIQECKLFYFAGQETTSVLLVWTLILLSRHQDWQALAREEVLQVFGNQKPDFDGLNRLKIVTMILYESLRLYPPVVTLTRRPKEDTVLGDVSLPAGVLISLPVILLHHDEEIWGKDAKKFKPERFRDGVSSATKGQVTFFPFTWGPRICIGQNFAMLEAKTTLAMILQRFSFELSPSYAHAPQSIITLQPQYGAPLILHKI

SEQ ID NO: 175 - DNA, 1572 bp, NICOTIANATABACUM
atttatctctgaaaatgcaattcttcagcttggtttccattttcctattcctatctttcctatttttgttgaggaaatggaagaactccaatagccaaagcaaaaaattgccaccaggtccatggaaaataccaatactaggaagtatgcttcatatgattggtggagaaccgcaccatgtccttagagatttagccaaaaaagatggaccacttatgcaccttcagttaggtgaaatttctgcagttgtggttacttctagggacatggcaaaagaagtgctaaaaactcatgacgtcgtttttgcatctaggcctaaaattgtagccatggacattatctgttataaccagtccgacattgcctttagcccttatggcgaccactggagacaaatgcgtaaaatttgtgtcatggaacttctcaatgcaaagaatgttcggtctttcagctccatcagacgtgatgaagtcgttcgtctcattgactctatccggtcagattcttcttcaggtgagctagttaattttacgcagaggatcatttggtttgcaagctccatgacgtgtagatcagcatttgggcaagtactcaaggggcaagacatatttgccaaaaagatcagagaagtaataggattagcagaaggctttgatgtggtagacatcttccctacatacaagtttcttcatgttctcagtgggatgaagcgtaaacttttgaatgcccaccttaaggtagacgccattgttgaggatgtcatcaacgagcacaagaaaaatcttgcagctggcaagagtaatggcgcattaggaggcgaagatctaattgatgtcctactgagacttatgaatgacacaagtcttcaatttcccatcaccaacgacaatatcaaagctgttgttgttgacatgtttgctgccggaacagaaacttcatcaacaacaactgtatgggccatggctgaaatgatgaagaatccaagtgtattcgccaaagctcaagcagaagtgcgagaagcctttagggacaaagtatcttttgatgaaaatgatgtggaggagctgaaatacttaaagttagtcattaaagaaactttgagacttcatccaccgtctccacttttggtcccaagagaatgcagggaagatacggatataaacggctacactattcctgcaaagaccaaagttatggttaatgtttgggcattgggaagagatccaaaatattgggatgacgcggaaagctttaagccagagagatttgagcaatgttctgtagatatttttggtaataattttgagtttcttccctttggcgggggacggagaatttgtcctggaatgtcatttggtttagctaatctttacttaccattggctcaattactctatcactttgactggaaactcccaaccggaatcaagccaagagacttggacttgaccgaattatcgggaataactattgctagaaagggtgacctttacttaaatgctactccttatcaaccttctcgagagtaatttactattggcataaacattttaaatttccttcatcaacctc

SEQ ID NO: 176 - protein, 504 aa, NICOTIANATABACUM
MQFFSLVSIFLFLSFLFLLRKWKNSNSQSKKLPPGPWKIPILGSMLHMIGGEPHHVLRDLAKKDGPLMHLQLGEISAVVVTSRDMAKEVLKTHDVVFASRPKIVAMDIICYNQSDIAFSPYGDHWRQMRKICVMELLNAKNVRSFSSIRRDEVVRLIDSIRSDSSSGELVNFTQRIIWFASSMTCRSAFGQVLKGQDIFAKKIREVIGLAEGFDVVDIFPTYKFLHVLSGMKRKLLNAHLKVDAIVEDVINEHKKNLAAGKSNGALGGEDLIDVLLRLMNDTSLQFPITNDNIKAVVVDMFAAGTETSSTTTVWAMAEMMKNPSVFAKAQAEVREAFRDKVSFDENDVEELKYLKLVIKETLRLHPPSPLLVPRECREDTDINGYTIPAKTKVMVNVWALGRDPKYWDDAESFKPERFEQCSVDIFGNNFEFLPFGGGRRICPGMSFGLANLYLPLAQLLYHFDWKLPTGIKPRDLDLTELSGITIARKGDLYLNATPYQPSRE

SEQ ID NO: 177 - DNA, 1633 bp, NICOTIANATABACUM
ataatgctttctcccatagaagccattgtaggactagtaaccttcacatttctcttcttcttcctatggacaaaaaaatctcaaaaaccttcaaaacccttaccaccgaaaatccccggaggatggccggtaatcggccatcttttccacttcaatgacgacggcgacgaccgtccattagctcgaaaactcggagacttagctgacaaatacggccccgttttcacttttcggctaggccttccccttgtcttagttgtaagcagttacgaagctgtaaaagactgtttctctacaaatgacgccattttttccaatcgtccagcttttctttacggcgattaccttggctacaataatgccatgctatttttggccaattacggaccttactggcgaaaaaatcgaaaattagttattcaggaagttctctccgctagtcgtctcgaaaaattcaaacacgtgagatttgcaagaattcaagcgagcattaagaatttatatactcgaattgatggaaattcgagtacgataaatttaactgattggttagaagaattgaattttggtctgatcgtgaagatgatcgctggaaaaaattatgaatccggtaaaggagatgaacaagtggagagatttaagaaagcgtttaaggattttatgattttatcaatggagtttgtgttatgggatgcatttccaattccattatttaaatgggtggattttcaagggcatgttaaggctatgaaaaggacttttaaagatatagattctgtttttcagaattggttaggggaacatattaataaaagagaaaaaatggaggttaatgcagaagggaatgaacaagatttcattgatgtggtgctttcaaaaatgagtaatgaatatcttggtgaaggttactctcgtgatactgtcattaaagcaacggtgtttagtttggtcttggatgcagcagacacagttgctcttcacataaattggggaatggcattattgataaacaatcaaaaggccttgacgaaagcacaagaagagatagacacaaaagttggtaaggacagatgggtagaagagagtgatattaaggatttggtatacctccaagctattgttaaagaagtgttacgattatatccaccaggacctttgttagtaccacacgaaaatgtagaagattgtgttgttagtggatatcacattcctaaagggacaagattattcgcaaacgtcatgaaactgctacgtgatcctaaactctggcctgatcctgatactttcgatccagagagattcattgctactgatattgactttcgtggtcagtactataagtatatcccgtttggttctggaagacgatcttgtccagggatgacttatgcattgcaagtggaacacttaacaatggcacatttgatccaaggtttcaattacagaactccaaatgacgagcccttggatatgaaggaaggtgcaggcataactatacgtaaggtaaatcctgtggaactgataatagcgcctcgcctggcacctgagctttattaaaacctaagatctttcatcttggttgatcattgtataatactcctaaatggatattcatttaccttttatcaattaa

SEQ ID NO: 178 - protein, 517 aa, NICOTIANATABACUM
MLSPIEAIVGLVTFTFLFFFLWTKKSQKPSKPLPPKIPGGWPVIGHLFHFNDDGDDRPLARKLGDLADKYGPVFTFRLGLPLVLVVSSYEAVKDCFSTNDAIFSNRPAFLYGDYLGYNNAMLFLANYGPYWRKNRKLVIQEVLSASRLEKFKHVRFARIQASIKNLYTRIDGNSSTINLTDWLEELNFGLIVKMIAGKNYESGKGDEQVERFKKAFKDFMILSMEFVLWDAFPIPLFKWVDFQGHVKAMKRTFKDIDSVFQNWLGEHINKREKMEVNAEGNEQDFIDVVLSKMSNEYLGEGYSRDTVIKATVFSLVLDAADTVALHINWGMALLINNQKALTKAQEEIDTKVGKDRWVEESDIKDLVYLQAIVKEVLRLYPPGPLLVPHENVEDCVVSGYHIPKGTRLFANVMKLLRDPKLWPDPDTFDPERFIATDIDFRGQYYKYIPFGSGRRSCPGMTYALQVEHLTMAHLIQGFNYRTPNDEPLDMKEGAGITIRKVNPVELIIAPRLAPELY

SEQ ID NO: 179 - DNA, 1585 bp, NICOTIANATABACUM
aatccataatgctttctcccatagaagccattgtaggactagtaaccttcacatttctcttcttcttcctatggacaaaaaaatctcaaaaaccttcaaaacccttaccaccgaaaatccccggaggatggccggtaatcggccatcttttccacttcaatgacgacggcgacgaccgtccattagctcgaaaactcggagacttagctgacaaatacggccccgttttcacttttcggctaggccttccccttgtcttagttgtaagcagttacgaagctgtaaaagactgtttctctacaaatgacgccattttttccaatcgtccagcttttctttacggcgattaccttggctacaataatgccatgctatttttggccaattacggaccttactggcgaaaaaatcgaaaattagttattcaggaagttctctccgctagtcgtctcgaaaaattcaaacacgtgagatttgcaagaattcaagcgagcattaagaatttatatactcgaattgatggaaattcgagtacgataaatttaactgattggttagaagaattgaattttggtctgatcgtgaagatgatcgctggaaaaaattatgaatccggtaaaggagatgaacaagtggagagatttaagaaagcgtttaaggattttatgattttatcaatggagtttgtgttatgggatgcatttccaattccattatttaaatgggtggattttcaagggcatgttaaggctatgaaaaggacttttaaagatatagattctgtttttcagaattggttagaggaacatattaataaaagagaaaaaatggaggttaatgcagaagggaatgaacaagatttcattgatgtggtgctttcaaaaatgagtaatgaatatcttggtgaaggttactctcgtgatactgtcattaaagcaacggtgtttagtttggtcttggatgcagcagacacagttgctcttcacataaattggggaatggcattattgataaacaatcaaaaggccttgacgaaagcacaagaagagatagacacaaaagttggtaaggacagatgggtagaagagagtgatattaaggatttggtatacctccaagctattgttaaagaagtgttacgattatatccaccaggacctttgttagtaccacacgaaaatgtagaagattgtgttgttagtggatatcacattcctaaagggacaagattattcgcaaacgtcatgaaactgcaacgtgatcctaaactctggtctgatcctgatactttcgatccagagagattcattgctactgatattgactttcgtggtcagtactataagtatatcccgtttggttctggaagacgatcttgtccagggatgacttatgcattgcaagtggaacacttaacaatggcacatttgatccaaggtttcaattacagaactccaaatgacgagcccttggatatgaaggaaggtgcaggcataactatacgtaaggtaaatcctgtggaactgataatagcgcctcgcctggcacctgagctttattaaaacctaagatcatcttgcttgat

SEQ ID NO: 180 - protein, 517 aa, NICOTIANATABACUM
MLSPIEAIVGLVTFTFLFFFLWTKKSQKPSKPLPPKIPGGWPVIGHLFHFNDDGDDRPLARKLGDLADKYGPVFTFRLGLPLVLVVSSYEAVKDCFSTNDAIFSNRPAFLYGDYLGYNNAMLFLANYGPYWRKNRKLVIQEVLSASRLEKFKHVRFARIQASIKNLYTRIDGNSSTINLTDWLEELNFGLIVKMIAGKNYESGKGDEQVERFKKAFKDFMILSMEFVLWDAFPIPLFKWVDFQGHVKAMKRTFKDIDSVFQNWLEEHINKREKMEVNAEGNEQDFIDVVLSKMSNEYLGEGYSRDTVIKATVFSLVLDAADTVALHINWGMALLINNQKALTKAQEEIDTKVGKDRWVEESDIKDLVYLQAIVKEVLRLYPPGPLLVPHENVEDCVVSGYHIPKGTRLFANVMKLQRDPKLWSDPDTFDPERFIATDIDFRGQYYKYIPFGSGRRSCPGMTYALQVEHLTMAHLIQGFNYRTPNDEPLDMKEGAGITIRKVNPVELIIAPRLAPELY

SEQ ID NO: 181 - DNA, 1620 bp, NICOTIANATABACUM
ctaaaactccataatggtttctcccgtagaagccattgtaggactagtaacccttacacttctcttctacttcctatggcccaaaaaatttcaaataccttcaaaaccattaccaccgaaaattcccggagggtggccggtaatcggccatcttttctacttcgatgatgacggcgacgaccgtccattagctcgaaaactcggagacttagctgacaaatacggcccggttttcactttccggctaggccttccgcttgtgttaattgtaagcagttacgaagctgtaaaagactgcttctctacaaatgacgccattttctccaatcgtccagcttttctttacggtgaataccttggctacaataatgccatgctatttttgacaaaatacggaccttattggcgaaaaaatagaaaattagtcattcaggaagttctctctgctagtcgtctcgaaaaattgaagcacgtgagatttggtaaaattcaaacgagcattaagagtttatacactcgaattgatggaaattcgagtacgataaatctaactgattggttagaagaattgaattttggtctgatcgtgaaaatgatcgctgggaaaaattatgaatccggtaaaggagatgaacaagtggagagatttaggaaagcgtataaggattttataattttatcaatggagtttgtgttatgggatgcttttccaattccattgttcaaatgggtggattttcaaggctatgttaaggccatgaaaaggacatttaaggatatagattctgtttttcagaattggttagaggaacatgtcaagaaaagagaaaaaatggaggttaatgcacaagggaatgaacaagatttcattgatgtggtgctttcaaaaatgagtaatgaatatcttgatgaaggttactctcgtgatactgtcataaaagcaacagtgtttagtttggtcttggatgctgcggacacagttgctcttcacatgaattggggaatggcattactgataaacaatcaacatgccttgaagaaagcacaagaagagatcgataagaaagttggtaaggaaagatgggtagaagagagtgatattaaggatttggtctacctccaagctattgttaaagaagtgttacgattatatccaccaggacctttattagtacctcatgaaaatgtagaggattgtgttgttagtggatatcacattcctaaagggactagactattcgcgaacgttatgaaattgcagcgcgatcctaaactctggtcaaatcctgataagtttgatccagagagattcttcgctgatgatattgactaccgtggtcagcactatgagtttatcccatttggttctggaagacgatcttgtccggggatgacttatgcattacaagtggaacacctaacaatagcacatttgatccagggtttcaattacaaaactccaaatgacgagcccttggatatgaaggaaggtgcaggattaactatacgtaaagtaaatcctgtagaagtgacaattacggctcgcctggcacctgagctttattaaaaccttagatgttttatcttgattgtactaatatatatatgcagaaaaaattg

SEQ ID NO: 182 - protein, 517 aa, NICOTIANATABACUM
MVSPVEAIVGLVTLTLLFYFLWPKKFQIPSKPLPPKIPGGWPVIGHLFYFDDDGDDRPLARKLGDLADKYGPVFTFRLGLPLVLIVSSYEAVKDCFSTNDAIFSNRPAFLYGEYLGYNNAMLFLTKYGPYWRKNRKLVIQEVLSASRLEKLKHVRFGKIQTSIKSLYTRIDGNSSTINLTDWLEELNFGLIVKMIAGKNYESGKGDEQVERFRKAYKDFIILSMEFVLWDAFPIPLFKWVDFQGYVKAMKRTFKDIDSVFQNWLEEHVKKREKMEVNAQGNEQDFIDVVLSKMSNEYLDEGYSRDTVIKATVFSLVLDAADTVALHMNWGMALLINNQHALKKAQEEIDKKVGKERWVEESDIKDLVYLQAIVKEVLRLYPPGPLLVPHENVEDCVVSGYHIPKGTRLFANVMKLQRDPKLWSNPDKFDPERFFADDIDYRGQHYEFIPFGSGRRSCPGMTYALQVEHLTIAHLIQGFNYKTPNDEPLDMKEGAGLTIRKVNPVEVTITARLAPELY

SEQ ID NO: 183 - DNA, 1941 bp, NICOTIANATABACUM
  misc_feature (1631)..(1631): n is a, c, g, or t
  misc_feature (1635)..(1635): n is a, c, g, or t
  misc_feature (1662)..(1662): n is a, c, g, or t
  misc_feature (1668)..(1668): n is a, c, g, or t
  misc_feature (1671)..(1671): n is a, c, g, or t
  misc_feature (1684)..(1684): n is a, c, g, or t
  misc_feature (1702)..(1702): n is a, c, g, or t
  misc_feature (1728)..(1728): n is a, c, g, or t
  misc_feature (1745)..(1745): n is a, c, g, or t
  misc_feature (1749)..(1749): n is a, c, g, or t
  misc_feature (1758)..(1759): n is a, c, g, or t
  misc_feature (1773)..(1773): n is a, c, g, or t
  misc_feature (1781)..(1781): n is a, c, g, or t
  misc_feature (1805)..(1805): n is a, c, g, or t
  misc_feature (1812)..(1812): n is a, c, g, or t
  misc_feature (1822)..(1822): n is a, c, g, or t
  misc_feature (1824)..(1824): n is a, c, g, or t
  misc_feature (1828)..(1829): n is a, c, g, or t
  misc_feature (1841)..(1841): n is a, c, g, or t
  misc_feature (1872)..(1872): n is a, c, g, or t
  misc_feature (1884)..(1884): n is a, c, g, or t
  misc_feature (1889)..(1890): n is a, c, g, or t
  misc_feature (1902)..(1902): n is a, c, g, or t
  misc_feature (1904)..(1904): n is a, c, g, or t
  misc_feature (1922)..(1922): n is a, c, g, or t
cgaggctccccaccaaaaaatcatttctctcgtctaaaatggatcttctcttactagagaagaccttaattggtcttttctttgccattttaatcgctttaattgtctctaaacttcgttcaaagcgttttaagcttcctccaggaccaattccagtaccagtttttggtaattggcttcaagttggtgatgatttaaaccacagaaatcttactgattatgccaaaaaatttggcgatcttttcttgttaagaatgggtcaacgtaacttagttgttgtgtcatctcctgaattagctaaagaagttttacacacacaaggtgttgaatttggttcaagaacaagaaatgttgtgtttgatatttttactggaaaaggtcaagatatggtttttactgtatatggtgaacattggagaaaaatgaggagaattatgactgtaccattttttactaataaagttgtgcaacagtatagaggggggtgggagtttgaggtggcaagtgtaattgaggatgtgaaaaaaaatcctgaatctgctactaatgggatcgtattaaggaggagattacaattaatgatgtataataatatgtttaggattatgtttgataggagatttgagagtgaagatgatcctttgtttgttaagcttaaggctttgaatggtgaaaggagtagattggctcaaagttttgagtataattatggtgattttattccaattttgaggccttttttgagaggttatttgaagatctgtaaagaagttaaggagaagaggctgcagcttttcaaagattactttgttgatgaaagaaagaagctttcaaataccaagagctcggacagcaatgccctaaaatgtgcgattgatcacattcttgaggctcaacagaagggagagatcaatgaggacaacgttctttacattgttgaaaacatcaatgttgctgcaattgaaacaacattatggtcaattgagtggggtatcgccgagctagtcaaccaccctcacatccaaaagaaactgcgcgacgagattgacacagttcttggaccaggagtgcaagtgactgaaccagacacccacaagcttccataccttcaggctgtgatcaaggaggcacttcgtctccgtatggcaattcctctattagtcccacacatgaaccttcacgacgcaaagcttggcgggtttgatattccagcagagagcaaaatcttggttaacgcttggtggttagctaacaacccggctcattggaagaaacccgaagagttcagacccgagaggttctttgaagaggagaagcatgttgaggccaatggcaatgacttcagatatcttccgtttggcgttggtaggaggagctgccctggaattatacttgcattgccaattcttggcatcactttgggacgtttggttcagaactttgagctgttgcctcctccaggccagtcgaagctcgacaccacagagaaaggtggacagttcagtctccacattttgaagcattccaccattgtgttgaaaccaaggtctttctgaactttgtgatcttattaattaaggggttctgaagaaatttgatagtgttggatattaagggcgaattsddabrtnctanatabacmmdktgaavskrskrkgvvgnwvgddnhrntdyakkgdrmgrnvvvssakvhtgvgsrtrnvvdtgkgdmvtvyghwrkmrrmtvtnkvvyrggwvasvdvkknsatngvrrrmmynnmrmdrrsddvkkangrsrasynygdrrgykckvkkrkdyvdrkksntkssdsnakcadhakgndnvyvnnvaattwswgavnhhkkrddtvggvvtdthkyavkarrmavhmnhdakggdaskvnawwannahwkkrrkhvangndrygvgrrscgagtgrvngskdttkggshkhstvkrs

SEQ ID NO: 184 - DNA, 1667 bp, NICOTIANATABACUM
caacacgcttactatctcctaaatctccactcaaaaacaaagaagagaaagatttaaaactaataattatgaaagagatggtgcaaaacaatatgagcacttctcttcttgaaactttacaagctacgcccatgatattctacttcatcgtccctctcttctgcttattccttctctccaaatctcgccgtaaacgtttgcctccaggtccaactggctggcctctcattggtaacatgatgatgatggaccagttaactcaccgtggccttgccaaactagcccaaaaatatggtggtgtttttcaccttaaaatgggttatgttcacaaaattgtagtctctggtccagacgaagctcgccaagtattacaggaacacgacatcatattttcgaaccgtccagcgaccgtagccataagttacctaacatatgacagggcagacatggcttttgctgactatggactcttctggcggcagatgagaaaactatgtgtaatgaaactcttcagccgcaaacgagctgagtcatgggactcagttcgagacgaagcggattccatggttagaattgtaacaaccaacacaggcacagctgttaacttaggtgaacttgttttcagtctcactcgtaatattatctacagagctgcttttggaacttgttctgaagatggacaaggcgagttcattgaaattatgcaagagttttcgaagctatttggcgctttcaatatagctgattttattccatggctagggtgggttggtaagcagagtctaaatattagacttgctaaggctagagcgtcgcttgatgggttcattgattcgattattgatgaccatattattagaaagaaagcttatgttaatggcaaaaatgatggaggtgatcgagaaactgatatggtggatgagcttttagctttttacagtgaggaagcaaaagtaactgagtccgaagatttgcagaatgctatcagacttactaaggatagtatcaaagctatcatcatggatgtaatgtttggagggacagaaacagtggcttctgcaatagaatgggccatggcagagcttatgaggagtcctgaagatcttaaaaaagtacaacaagggctggctaacgttgttggactcaacagaaaagttgaagaatctgactttgaaaaattaacatacttaagatgttgtctaaaagaaactctacgacttcaccctccaatccctctcctcctccatgagaccgccgaggaatccaccgtctccggctaccatattccggcaaagtcacatgttattataaattcatttgccattgggcgtgacaaaaattcatgggaagatcctgaaacttataaaccatctaggtttctcaaagaaggtgtaccagattttaaaggaggtaattttgagtttataccatttgggtcgggtcggcggtcttgccccggtatgcaacttgggctttatgcattggaaatggctgtggcccatcttcttcattgttttacttgggaattgccagatggtatgaaaccaagtgagcttaaaatggatgatatttttggactcactgctccaagagctaatcgactcgtggctgtgcctactccacgcttgttgtgtcccctttattaattgaagaaaaaaggtggggct

SEQ ID NO: 185 - protein, 525 aa, NICOTIANATABACUM
MKEMVQNNMSTSLLETLQATPMIFYFIVPLFCLFLLSKSRRKRLPPGPTGWPLIGNMMMMDQLTHRGLAKLAQKYGGVFHLKMGYVHKIVVSGPDEARQVLQEHDIIFSNRPATVAISYLTYDRADMAFADYGLFWRQMRKLCVMKLFSRKRAESWDSVRDEADSMVRIVTTNTGTAVNLGELVFSLTRNIIYRAAFGTCSEDGQGEFIEIMQEFSKLFGAFNIADFIPWLGWVGKQSLNIRLAKARASLDGFIDSIIDDHIIRKKAYVNGKNDGGDRETDMVDELLAFYSEEAKVTESEDLQNAIRLTKDSIKAIIMDVMFGGTETVASAIEWAMAELMRSPEDLKKVQQGLANVVGLNRKVEESDFEKLTYLRCCLKETLRLHPPIPLLLHETAEESTVSGYHIPAKSHVIINSFAIGRDKNSWEDPETYKPSRFLKEGVPDFKGGNFEFIPFGSGRRSCPGMQLGLYALEMAVAHLLHCFTWELPDGMKPSELKMDDIFGLTAPRANRLVAVPTPRLLCPLY

SEQ ID NO: 186 - DNA, 1620 bp, NICOTIANATABACUM
gggggataagaatatggagataccatattacagcttaaaacttacaattttttcatttgcaattatctttgtactaagatgggcatggaaaatcttgaattatgtgtggttaaaaccaaaagaattggagaaatgcatcagacagcagggtttcaaaggaaactcttacaaattcttgtttggggatatgaaagagataaagaaaatgggtgaagaagctatgtctaagccaatcaatttctctcatgacatgatttggcctagagtcatgcccttcatccacaaaaccatcaccaattatggtaagaattgttttgtgtggtttgggccaagaccagcagtcctgatcacagacccggaacttgtaaaggaggtgctaacgaagaatttcgtttatcagaagccacctggcactccactcacaaaattggcagcaactggaattgcaggctatgaaacagataaatgggctacacatagaaggcttctcaatcctgcttttcaccttgacaagttgaagcatatgctacctgcattccaatttactgcttgtgagatgttgagcaaattggagaaagttgtctcaccaaatggaacagagatagatgtgtggccatatctacaaactttaacaagtgatgccatttcaagaactgcttttggcagtagttatgaagaaggaagaaagctttttgaacttcaaaaggaacaactttcactaattctagaagtgtcccgcacaatatacatcccaggatggaggtttttgccaacaaaaaggaacaaaaggatgaagcaaatatttaatgaagtacgagcgctggtattgggaattattaagaaaagattgagtatgattgaaaatggagaagctcctgatgatttattgggtatattattggcatccaatttaaaagaaatccaacaacatggaaataacaagaaatttggtatgagtattgatgaggtgattgaagagtgtaaactcttctattttgcggggcaagagacaacttcatctttacttgtatggactatgattttgttgtgcaaacatcctagttggcaagataaagctagagaagaggttttgcaagtgtttggaagtagggaagttgactatgacaagttgaatcagctaaaaatagtaactatgatcttaaacgaggtcttaaggttgtatccagcaggatatgcgattaatcgaatggtaaccaaagaaacaaagttagggaatttatgtttaccagctggggtacaactcttgttaccaacaattttgttgcaacatgatactgaaatatggggagatgatgcaatggagttcaatccagagagatttagtgatggaatatccaaagcaacaaaaggaaaacttgtgttctttccatttagttggggtccaagaatatgtattgggcaaaattttgctatgttagaggccaagatggcaatggctatgattctgaaaaactatgcatttgaactctctccatcttatgctcatgctcctcatccactactacttcaacctcaatatggtgctcaattaattttgtacaagttgtagaaatggtcaatttggaacttgttatggaacttttatcatcgtaatcaacc

SEQ ID NO: 187 - protein, 518 aa, NICOTIANATABACUM
MEIPYYSLKLTIFSFAIIFVLRWAWKILNYVWLKPKELEKCIRQQGFKGNSYKFLFGDMKEIKKMGEEAMSKPINFSHDMIWPRVMPFIHKTITNYGKNCFVWFGPRPAVLITDPELVKEVLTKNFVYQKPPGTPLTKLAATGIAGYETDKWATHRRLLNPAFHLDKLKHMLPAFQFTACEMLSKLEKVVSPNGTEIDVWPYLQTLTSDAISRTAFGSSYEEGRKLFELQKEQLSLILEVSRTIYIPGWRFLPTKRNKRMKQIFNEVRALVLGIIKKRLSMIENGEAPDDLLGILLASNLKEIQQHGNNKKFGMSIDEVIEECKLFYFAGQETTSSLLVWTMILLCKHPSWQDKAREEVLQVFGSREVDYDKLNQLKIVTMILNEVLRLYPAGYAINRMVTKETKLGNLCLPAGVQLLLPTILLQHDTEIWGDDAMEFNPERFSDGISKATKGKLVFFPFSWGPRICIGQNFAMLEAKMAMAMILKNYAFELSPSYAHAPHPLLLQPQYGAQLILYKL

SEQ ID NO: 188 - DNA, 1566 bp, NICOTIANATABACUM
gtcctaactaaaaatggagattcagttttctaacttagttgcattcttgctctttctctccagcatctttcttctattcaaaaaatggaaaaccagaaaactaaatttgcctcctggtccatggaaattaccttttattggaagtttacaccatttggctgtggcaggtccacttcctcaccatggcctaaaaaatttagccaaacgctatggtcctcttatgcatttacaacttggacaaattcctacactcatcatatcatcacctcaaatggcaaaagaagtactaaaaactcacgacctcgcttttgccactagaccaaagcttgtcgtggccgacatcattcactacgacagcacggacatagcattttctccgtacggtgaatactggagacaaattcgtaaaatttgcatattggaactcttgagtgccaagatggtcaaattttttagctcgattcgccaagatgagctctcgaagatgctctcatctatacgaacgacacccaatcttacagtcaatcttactgacaaaattttttggtttacgagttcggtaacttgtagatcagctttagggaagatatgtggtgaccaagacaaattgatcatttttatgagggaaataatatcattggcaggtggatttagtattgctgattttttccctacatggaaaatgattcatgatattgatggttcgaaatctaaactggtgaaagcacatcgtaagattgatgaaattttgggaaatgttgttgatgagcacaaaaagaacagagcagatggcaagaagggtaatggtgaatttggtggtgaagatttgattgatgtattgttaagagttagagaaagtggagaagttcaaattcctatcacaaatgacaatatcaaatcaatattaatcgacatgttctctgcgggatctgaaacatcatcgacgactataatttgggcattagctgaaatgatgaagaaaccaagtgttttagcaaaggcacaagctgaagtaaggcaagctttgaaggagaaaaaaggttttcaacagattgatcttgatgagctaaaatatctcaagttagtaatcaaagaaaccttaagaatgcaccctccaattcctctattagttcctagagaatgtatggaggatacaaagattgatggttacaatatacctttcaaaacaagagtcatagttaatgcatgggcaatcggacgagatccagaaagttgggatgaccccgaaagctttatgccagagagatttgagaatagttctattgactttcttggaaatcatcatcagtttataccatttggtgcaggaagaaggatttgtccgggaatgctatttggtttagctaatgttggacaacctttagctcagttactttatcacttcgattggaaactccctaatggacaaagtcatgagaatttcgacatgactgagtcacctggaatttctgctacaagaaaggatgatcttgttttgattgccactccttatgattcttattaagcagtagcagaaataaaaagccggggcaaacagaaaaaagt

SEQ ID NO: 189 - protein, 503 aa, NICOTIANATABACUM
MEIQFSNLVAFLLFLSSIFLLFKKWKTRKLNLPPGPWKLPFIGSLHHLAVAGPLPHHGLKNLAKRYGPLMHLQLGQIPTLIISSPQMAKEVLKTHDLAFATRPKLVVADIIHYDSTDIAFSPYGEYWRQIRKICILELLSAKMVKFFSSIRQDELSKMLSSIRTTPNLTVNLTDKIFWFTSSVTCRSALGKICGDQDKLIIFMREIISLAGGFSIADFFPTWKMIHDIDGSKSKLVKAHRKIDEILGNVVDEHKKNRADGKKGNGEFGGEDLIDVLLRVRESGEVQIPITNDNIKSILIDMFSAGSETSSTTIIWALAEMMKKPSVLAKAQAEVRQALKEKKGFQQIDLDELKYLKLVIKETLRMHPPIPLLVPRECMEDTKIDGYNIPFKTRVIVNAWAIGRDPESWDDPESFMPERFENSSIDFLGNHHQFIPFGAGRRICPGMLFGLANVGQPLAQLLYHFDWKLPNGQSHENFDMTESPGISATRKDDLVLIATPYDSY

SEQ ID NO: 190 - DNA, 1652 bp, NICOTIANATABACUM
caactaacaaacacattgagtcctctcccaaatcactgattcaccaccaaaagtaccaacaattcaatggaaggtacaaacttgactacatatgcagcagtatttcttgatactctgtttcttttgttcctttccaaacttcttcgccagaggaaactcaatttacctccaggcccaaaaccatggccgatcatcggaaacttaaaccttattggcaatcttcctcatcgctcaatccacgaactctccctcaagtacggacccgttatgcaactccaattcgggtctttccccgttgtagttggatcctccgtcgaaatggctaagattttcctcaaatccatggatattaactttgtaggcaggcctaaaacggctgccggaaaatacacaacgtacaattattccgatattacatggtctccttacggaccatattggcgccaggcacgtaggatgtgcctaacggaattattcagcacgaaacgtctcgattcatacgagtatattcgggctgaggagttgcattctcttctccataatttgaacaaaatatcagggaaaccaattgtgttgaaagattattcgacgacgttgagtttaaatgttattagcaggatggtactggggaaaaggtatttggacgaatccgagaactcgttcgtgaatcctgaggaatttaagaagatgttggacgaattgtttttgctaaatggtgtacttaatattggagattcaattccatggattgatttcatggatttgcaaggttatgttaagaggatgaaagtagtgagcaagaaattcgacaagtttttagagcatgttattgatgagcataacattaggagaaatggagtggagaattatgttgctaaggatatggtggatgttttgttgcagctcgctgatgatccgaagttggaagttaagctggagagacatggagtcaaagcattcactcaggatatgctggctggtggaaccgagagttcagcagtgacagtggagtgggcaatttcagagctgctaaagaagccggagattttcaaaaaggctacagaagaattggatcgagtaattgggcagaatagatgggtacaagaaaaggacattccaaatcttccttacatagaggcaatagtcaaagagactatgcgactgcaccccgtggcaccaatgttggtgccacgtgagtgtcgagaagatattaaggtagcaggctacgacgttcagaaaggaactagggttctcgtgagtgtatggactattggaagagaccctacattgtgggacgagcctgaggtgttcaagccggagagattccatgaaaggtccatagatgttaaaggacatgattatgagcttttgccatttggagcggggagaagaatgtgcccgggttatagcttggggctcaaggtgattcaagctagcttagctaatcttctacatggatttaactggtcattgcctgataatatgactcctgaggacctcaacatggatgagatttttgggctctctacacctaaaaaatttccacttgctactgtgattgagccaagactttcaccaaaactttactctgtttgattcagcagttctatggttccgtcaagatagactttgttacgtttgaacctgtgctc

SEQ ID NO: 191 - protein, 509 aa, NICOTIANATABACUM
MEGTNLTTYAAVFLDTLFLLFLSKLLRQRKLNLPPGPKPWPIIGNLNLIGNLPHRSIHELSLKYGPVMQLQFGSFPVVVGSSVEMAKIFLKSMDINFVGRPKTAAGKYTTYNYSDITWSPYGPYWRQARRMCLTELFSTKRLDSYEYIRAEELHSLLHNLNKISGKPIVLKDYSTTLSLNVISRMVLGKRYLDESENSFVNPEEFKKMLDELFLLNGVLNIGDSIPWIDFMDLQGYVKRMKVVSKKFDKFLEHVIDEHNIRRNGVENYVAKDMVDVLLQLADDPKLEVKLERHGVKAFTQDMLAGGTESSAVTVEWAISELLKKPEIFKKATEELDRVIGQNRWVQEKDIPNLPYIEAIVKETMRLHPVAPMLVPRECREDIKVAGYDVQKGTRVLVSVWTIGRDPTLWDEPEVFKPERFHERSIDVKGHDYELLPFGAGRRMCPGYSLGLKVIQASLANLLHGFNWSLPDNMTPEDLNMDEIFGLSTPKKFPLATVIEPRLSPKLYSV

SEQ ID NO: 192 - DNA, 1657 bp, NICOTIANATABACUM
cttcttccttcctaactaaaaatggagattcagttttctaacttagttgcattcttgctctttctctccagcatctttcttgtattcaaaaaatggaaaaccagaaaactaaatttgcctcctggtccatggaaattaccttttattggaagtttacaccatttggctgtggcaggtccacttcctcaccatggcctaaaaaatttagccaaacgctatggtcctcttatgcatttacaacttggacaaattcctacactcgtcatatcatcacctcaaatggcaaaagaagtactaaaaactcacgacctcgcttttgccactagaccaaagcttgtcgtggccgacatcattcactacgacagcacggacatagcattttcgccatacggtgaatactggagacaaattcgtaaaatttgcatattggaactcttgagtgccaagatggtcaagttttttagctcgattcgccaagatgagctctcgaagatggtttcatctatacgaacgacgcccaatcttccagtcaatcttaccgacaagattttttggtttacgagttcggtaatttgtagatcagctttagggaagatatgtggtgaccaagacaaattgatcatttttatgagggaaataatatcattggcaggtggatttagtattgctgattttttccctacatggaaaatgattcatgatattgatggttcaaaatctaaactggtgaaggcacatcgtaagattgatgaaattttggaaaatgtggtaaatgagcacaaacagaatcgagcagatggtaaaaagggtaatggtgaatttggtggagaagatctgattgatgttttgttaagagttagagaaagtggagaagttcaaattccaatcacagatgacaatatcaaatcaatattaatcgacatgttctctgccggatcggaaacatcatcgacaactataatttgggcattagctgaaatgatgaagaaaccaagtgttttagcaaaggcacaagctgaagtgaggcaagctttgaaggggaagaaaattagttttcaagagattgatattgataagctaaagtatttgaagttagtgatcaaagaaactttaagaatgcaccctccaattcctctgttagtccctagagaatgtatggaagatacaaagattgatggttacaatatacctttcaaaacaagagtcattgttaatgcatgggcaattggacgagatcctcaaagttgggatgatcctgaaagctttacgccagagagatttgagaataattctattgattttcttggaaatcatcatcaatttattccatttggtgcaggaagaaggatttgtcctggaatgctatttggtttagctaatgttggacaacctttagctcagttactttatcacttcgattggaaactccctaatggacaaagtcatgagaatttcgacatgactgagtcacctggaatttctgctacaagaaaggatgatcttgttttgattgccactccttatgattcttattaagcagtagcagaaataaaaagccggggcaaacagaaaaaagtattgctgcttctaggtattttctattggataaatttcaaaattcatccacaatatttagtgtttgctagagttggttagc

SEQ ID NO: 193 - protein, 504 aa, NICOTIANATABACUM
MEIQFSNLVAFLLFLSSIFLVFKKWKTRKLNLPPGPWKLPFIGSLHHLAVAGPLPHHGLKNLAKRYGPLMHLQLGQIPTLVISSPQMAKEVLKTHDLAFATRPKLVVADIIHYDSTDIAFSPYGEYWRQIRKICILELLSAKMVKFFSSIRQDELSKMVSSIRTTPNLPVNLTDKIFWFTSSVICRSALGKICGDQDKLIIFMREIISLAGGFSIADFFPTWKMIHDIDGSKSKLVKAHRKIDEILENVVNEHKQNRADGKKGNGEFGGEDLIDVLLRVRESGEVQIPITDDNIKSILIDMFSAGSETSSTTIIWALAEMMKKPSVLAKAQAEVRQALKGKKISFQEIDIDKLKYLKLVIKETLRMHPPIPLLVPRECMEDTKIDGYNIPFKTRVIVNAWAIGRDPQSWDDPESFTPERFENNSIDFLGNHHQFIPFGAGRRICPGMLFGLANVGQPLAQLLYHFDWKLPNGQSHENFDMTESPGISATRKDDLVLIATPYDSY

SEQ ID NO: 194 - DNA, 1610 bp, NICOTIANATABACUM
cttcttccttcctaactaaaaatggagattcagttttctaacttagttgcattcttgctctttctctccagcatctttcttgtattcaaaaaatggaaaaccagaaaactaaatttgcctcctggtccatggaaattaccttttattggaagtttacaccatttggctgtggcaggtccacttcctcaccatggcctaaaaaatttagccaaacgctatggtcctcttatgcatttacaacttggacaaattcctacactcgtcatatcatcacctcaaatggcaaaagaagtactaaaaactcacgacctcgcttttgccactagaccaaagcttgtcgtggccgacatcattcactacgacagcacggacatagcactttcgccatacggtgaatactggagacaaattcgtaaaatttgcatattggaactcttgagtgccaagatggtcaagttttttagctcgattcgccaagatgagctctcgaagatggtttcatctatacgaacgacgcccaatcttccagtcaatcttaccgacaagattttttggtttacgagttcggtaatttgtagatcagctttagggaagatatgtggtgaccaagacaaattgatcatttttatgagggaaataatatcattggcaggtggatttagtattgctgattttttccctacatggaaaatgattcatgatattgatggttcaaaatctaaactggtgaaggcacatcgtaagattgatgaaattttggaaaatgtggtaaatgagcacaaacagaatcgagcagatggtaaaaagggtaatggtgaatttggtggagaagatctgattgatgttttgttaagagttagagaaagtggagaagttcaaattccaatcacagatgacaatatcaaatcaatattaatcgacatgttctctgccggatcggaaacatcatcgacaactataatttgggcattagctgaaatgatgaagaaaccaagtgttttagcaaaggcacaagctgaagtgagccaagctttgaaggggaagaaaattagttttcaagagattgatattgataagctaaagtatttgaagttagtgatcaaagaaactttaagaatgcaccctccaattcctctgttagtccctagagaatgtatggaagatacaaagattgatggttacaatatacctttcaaaacaagagtcattgttaatgcatgggcaattggacgagatcctcaaagttgggatgatcctgaaagctttacgccagagagatttgagaataattctattgattttcttggaaatcatcatcaatttattccatttggtgcaggaagaaggatttgtcctggaatgctatttggtttagctaatgttggacaacctttagctcagttactttatcacttcgattggaaactccctaatggacaaactcaccaaaatttcgacatgactgagtcacctggaatttctgctacaagaaaggatgatcttattttgattgccactcctgctcattcttgattaagtattgctgcttttctattggagaattttcaaaattcatccacaatatatagtgtttgctagagttggttagc

SEQ ID NO: 195 - protein, 503 aa, NICOTIANATABACUM
MEIQFSNLVAFLLFLSSIFLVFKKWKTRKLNLPPGPWKLPFIGSLHHLAVAGPLPHHGLKNLAKRYGPLMHLQLGQIPTLVISSPQMAKEVLKTHDLAFATRPKLVVADIIHYDSTDIALSPYGEYWRQIRKICILELLSAKMVKFFSSIRQDELSKMVSSIRTTPNLPVNLTDKIFWFTSSVICRSALGKICGDQDKLIIFMREIISLAGGFSIADFFPTWKMIHDIDGSKSKLVKAHRKIDEILENVVNEHKQNRADGKKGNGEFGGEDLIDVLLRVRESGEVQIPITDDNIKSILIDMFSAGSETSSTTIIWALAEMMKKPSVLAKAQAEVSQALKGKKISFQEIDIDKLKYLKLVIKETLRMHPPIPLLVPRECMEDTKIDGYNIPFKTRVIVNAWAIGRDPQSWDDPESFTPERFENNSIDFLGNHHQFIPFGAGRRICPGMLFGLANVGQPLAQLLYHFDWKLPNGQTHQNFDMTESPGISATRKDDLILIATPAHS

SEQ ID NO: 196 - DNA, 1664 bp, NICOTIANATABACUM
atccttcttccttcctaggtcctaactaaaaatggagattcagttttctaacttagttgcattcttgctctttctctccagcatctttcttctattcaaaaaatggaaaaccagaaaactaaatttgcctcctggtccatggaaattaccttttattggaagtttacaccatttggctgtggcaggtccacttcctcaccatggcctaaaaaatttagccaaacgctatggtcctcttatgcatttacaacttggacaaattcctacactcatcatatcatcacctcaaatggcaaaagaagtactaaaaactcacgacctcgcttttgccactagaccaaagcttgtcgtggccgacatcattcactacgacagcacggacatagcattttctccgtacggtgaatactggagacaaattcgtaaaatttgcatattggaactcttgagtgccaagatggtcaaattttttagctcgattcgccaagatgagctctcgaagatgctctcatctatacgaacgacacccaatcttacagtcaatcttactgacaaaattttttggtttacgagttcggtaacttgtagatcagctttagggaagatatgtggtgaccaagacaaattgatcatttttatgagggaaataatatcattggcaggtggatttagtattgctgattttttccctacatggaaaatgattcatgatattgatggttcgaaatctaaactggtgaaagcacatcgtaagattgatgaaattttgggaaatgttgttgatgagcacaaaaagaacagagcagatggcaagaagggtaatggtgaatttggtggtgaagatttgattgatgtattgttaagagttagagaaagtggagaagttcaaattcctatcacaaatgacaatatcaaatcaatattaatcgacatgttctctgcgggatctgaaacatcatcgacgactataatttgggcattagctgaaatgatgaagaaaccaagtgttttagcaaaggcacaagctgaagtaaggcaagctttgaaggagaaaaaaggttttcaacagattgatcttgatgagctaaaatatctcaagttagtaatcaaagaaaccttaagaatgcaccctccaattcctctattagttcctagagaatgtatggaggatacaaagattgatggttacaatatacctttcaaaacaagagtcatagttaatgcatgggcaatcggacgagatccagaaagttgggatgaccccgaaagctttatgccagagagatttgagaatagttctattgactttcttggaaatcatcatcagtttataccatttggtgcaggaagaaggatttgtccgggaatgctatttggtttagctaatgttggacaacctttagctcagttactttatcacttcgattggaaactccctaatggacaaagtcatgagaatttcgacatgactgagtcacctggaatttctgctacaagaaaggatgatcttgttttgattgccactccttatgattcttattaagcagtagcagaaataaaaagccggggcaaacagaaaaaagtattgctgcttctaggtattttctattggataaatttcaaaattcatccacaatatttagtgtttgctagagttggttagc

SEQ ID NO: 197 - protein, 503 aa, NICOTIANATABACUM; identical to SEQ ID NO: 189

SEQ ID NO: 198 - DNA, 1625 bp, NICOTIANATABACUM
ttcttattttgattcaaccatggagaaccaatactcctactcattctcttcctacttctacttagctatagtactgtttcttcttccaattttggtcaaatatttcttccatcggagaagaaatttacctccaagtccattttctcttccaataattggtcacctttaccttctcaagaaaactctccatctcactctaacatccttatcagctaaatatggtcctgttttatacctcaaattgggctctatgcctgtgattgttgtgtcctcaccatctgctgttgaagaatgtttaaccaagaatgatatcatattcgcaaataggcccaagaccgtggctggtgacaagtttacctacaattatactgtttatgtttgggcaccctatggccaactttggagaattcttcgccgattaactgtcgttgaactcttctcttcacatagcctacagaaaacttctatccttagagatcaagaagttgcaatatttatccgttcgttatacaaattctcaaaggatagtagcaaaaaagtcgatttgaccaactggtcttttactttggttttcaatcttatgaccaaaattattgctgggagacatattgtgaaggaggaagatgctggcaaggaaaagggcattgaaattattgaaaaacttagagggactttcttagtaactacatcattcttgaatatgtgtgatttcttgccagtattcaggtgggttggttacaaagggctggagaagaagatggcctcaattcacaatagaagaaatgaattcttgaacagcttgcttgatgaatttcgacacaagaaaagtagtgcttcacaatctaacacaactgttggaaacatggagaagaaaaccacactgattgaaaagctcttgtctcttcaagaatcagagcctgaattctacactgatgatatcatcaaaagtattatgctggtagtttttgttgcaggaacagagacctcatcaacaaccatccaatgggtaatgaggcttcttgtagctcaccctgaggcattgtataagctacgagctgacattgacagtaaagttgggaataagcgcttgctgaatgaatcagacctcaacaagcttccgtatttgcattgtgttgttaatgagacaatgagattatacactccgataccacttttattgcctcattattcaactaaagattgtattgtggaaggatatgatgtaccaaaacatacaatgttgtttgtcaacgcttgggccattcacagggatcccaaggtatgggaggagcctgacaagttcaagccagagagatttgaggcaacagaaggggaaacagaaaggttcaattacaagcttgtaccatttggaatggggagaagagcgtgccctggagctgatatggggttgcgagcagtttctttggcattaggtgcacttattcaatgctttgactggcaaattgaggaagcggaaagcttggaggaaagctataattctagaatgactatgcagaacaagcctttgaaggttgtctgcactccacgcgaagatcttggccagcttctatcccaactctaaggcaatttatcaatgccaaacgtaatcttcatctaccactatg

SEQ ID NO: 199 - protein, 520 aa, NICOTIANATABACUM
MENQYSYSFSSYFYLAIVLFLLPILVKYFFHRRRNLPPSPFSLPIIGHLYLLKKTLHLTLTSLSAKYGPVLYLKLGSMPVIVVSSPSAVEECLTKNDIIFANRPKTVAGDKFTYNYTVYVWAPYGQLWRILRRLTVVELFSSHSLQKTSILRDQEVAIFIRSLYKFSKDSSKKVDLTNWSFTLVFNLMTKIIAGRHIVKEEDAGKEKGIEIIEKLRGTFLVTTSFLNMCDFLPVFRWVGYKGLEKKMASIHNRRNEFLNSLLDEFRHKKSSASQSNTTVGNMEKKTTLIEKLLSLQESEPEFYTDDIIKSIMLVVFVAGTETSSTTIQWVMRLLVAHPEALYKLRADIDSKVGNKRLLNESDLNKLPYLHCVVNETMRLYTPIPLLLPHYSTKDCIVEGYDVPKHTMLFVNAWAIHRDPKVWEEPDKFKPERFEATEGETERFNYKLVPFGMGRRACPGADMGLRAVSLALGALIQCFDWQIEEAESLEESYNSRMTMQNKPLKVVCTPREDLGQLLSQL

SEQ ID NO: 200 - DNA, 1767 bp, NICOTIANATABACUM
aaccaaccttccttttcttacttagtaaaatggatattcagtcttctcctttcaacttaattgctttgctactcttcatttcatttctttttatcctattgaaaaagtggaataccaaaatcccaaagttacctccaggtccatggagacttccccttattggcagcctccatcacttgaaaggtaaactcccacaccatcatcttagagatttagcccgaaaatatggacctctcatgtatttacaacttggagaagttcctgtagttgtaatatcttcgccacgtatagcaaaagctgtactaaaaactcatgatcttgcttttgcaacgaggcctcggttcatgtcctcggacattgtgttttacaaaagcagggacatatcattcgccccatatggcgattactggagacaaatgcgtaaaatattaacacaagaactcttgagtaacaagatgctcaagtcatttagcacaatccgaaaggatgagctctcgaagctcctctcgtcgattcgtttagcaacagcttcttctgcagtgaacataaacgaaaagcttctctggtttacaagttgcatgacttgtagattagcctttggaaaaatatgcaacgatcgtgatgaattgattatgttaataagggagatattagcattatcaggaggatttgatgtgtgtgatttgttcccttcatggaaattacttcacaatatgagcaacatgaaagctagattgacgaatgttcaccataagtataatctaattatggagaatatcatcaatgagcacaaagagaatcatgcagcagggataaagggaaataacgagtttggtggcgaagatatgattgatgctttactgagggttaaggagaataatgagcttcaatttcctatcgaaaatgacaacatgaaagcagtaattctggacttgtttattgctggaactgaaacttcatatactgcaattatatgggcactatcagaattgatgaagcacccaagtgttatggccaaggcacaagctgaagtgagaaaagtcttcaaagaaaatgaaaacttggacgaaaatgatcttgacaagttgccatacttaaaatcagtgatcaaagaaacactaaggatgcatcctccagttcctttattaggacctagagaatgcagagaacaaactgagattgatggatatactgtacctcttaaagctagagtaatggttaatgcatgggcaattggaagagatcctgaaagttgggaagatcctgaaagtttcaaacccgagcgatttgaaaatatttctgttgatcttacgggaaatcactatcagttcatccctttcggttcaggaagaagaatgtgtccaggaatgtcgtttggtttagttaacactgggcatcctttagctcagttgctctatttctttgactggaaattccctcataaggttaatgcagctgattttcacactactgaaacaagtagagtttttgcagcaagcaaagatgacctctacttgattccaacaaatcacatggagcaagagtagctctaaattgaattcttgtcttggaacaataaaagaagaaactccagcttggtctacattatttctttttgctttatattagtatgggtgtgttcagtttcttatttttaagggtaccctgaaagataaagggctatataaaccagtgagactttttattggttgcaaggttttagatcaagccataagacagcatattttattcaaaaaaaaaaaaaaa

SEQ ID NO: 201 - protein, 505 aa, NICOTIANATABACUM
MDIQSSPFNLIALLLFISFLFILLKKWNTKIPKLPPGPWRLPLIGSLHHLKGKLPHHHLRDLARKYGPLMYLQLGEVPVVVISSPRIAKAVLKTHDLAFATRPRFMSSDIVFYKSRDISFAPYGDYWRQMRKILTQELLSNKMLKSFSTIRKDELSKLLSSIRLATASSAVNINEKLLWFTSCMTCRLAFGKICNDRDELIMLIREILALSGGFDVCDLFPSWKLLHNMSNMKARLTNVHHKYNLIMENIINEHKENHAAGIKGNNEFGGEDMIDALLRVKENNELQFPIENDNMKAVILDLFIAGTETSYTAIIWALSELMKHPSVMAKAQAEVRKVFKENENLDENDLDKLPYLKSVIKETLRMHPPVPLLGPRECREQTEIDGYTVPLKARVMVNAWAIGRDPESWEDPESFKPERFENISVDLTGNHYQFIPFGSGRRMCPGMSFGLVNTGHPLAQLLYFFDWKFPHKVNAADFHTTETSRVFAASKDDLYLIPTNHMEQE

SEQ ID NO: 202 - DNA, 1736 bp, NICOTIANATABACUM
aaccaaccttccttttcttacttagtaaaatggatattcagtcttctcctttcaacttaattgctttgctactcttcatttcatttctttttatcctattgaaaaagtggaataccaaaatcccaaagttacctccaggtccatggagacttccccttattggcagcctccatcacttgaaaggtaaactcccacaccatcatcttagagatttagcccgaaaatatggacctctcatgtatttacaacttggagaagttcctgtagttgtaatatcttcgccacgtatagcaaaagctgtactaaaaactcatgatcttgcttttgcaacgaggcctcggttcatgtcctcggacattgtgttttacaaaagcagggacatatcattcgccccatatggcgattactggagacaaatgcgtaaaatattaacacaagaactcttgagtaacaagatgctcaagtcatttagcacaatccgaaaggatgggctctcgaagctcctctcgtcgattcgtttagcaacagcttcttctgcagtgaacataaacgaaaagcttctctggtttacaagttgcatgacttgtagattagcctttggaaaaatatgcaacgatcgtgatgaattgattatgttaataagggagatattagcattatcaggaggatttgatgtgtgtgatttgttcccttcatggaaattacttcacaatatgagcaacatgaaagctagattgacgaatgttcaccataagtataatctaattatggagaatatcatcaatgagcacaaagagaatcatgcagcagggataaagggaaataacgagtttggtggcgaagatatgattgatgctttactgagggttaaggagaataatgagcttcaatttcctatcgaaaatgacaacatgaaagcagtaattctggacttgtttattgctggaactgaaacttcatatactgcaattatatgggcactatcagaattgatgaagcacccaagtgttatggccaaggcacaagctgaagtgagaaaagtcttcaaagaaaatgaaaacttggacgaaaatgatcttgacaagttgccatacttaaaatcagtgatcaaagaaacactaaggatgcatcctccagttcctttattaggacctagagaatgcagagaacaaactgagattgatggatatactgtacctcttaaagctagagtaatggttaatgcatgggcaattggaagagatcctgaaagttgggaagatcctgaaagtttcaaacccgagcgatttgaaaatatttctgttgatcttacgggaaatcactatcagttcattcctttcggttcaggaagaagaatgtgtccaggaatgtcgtttggtttagttaacactgggcatcctttagctcagttgctctatttctttgactggaaattccctcataaggttaatgcagctgattttcacactactgaaacaagtagagtttttgcagcaagcaaagatgacctctacttgattccaacaaatcacatggagcaagagtagctctaaattgaattcttgtcttggaacgataaaagaagaaactccagcttggtctacattatttctttttgctttatattagtatgggtgtgttcagtttcttgtttttaagggtaccctgaaagataaagggctatataaaccagtgagactttttattgaaaaaaaaaaaaaaaaaaaaaaaaaaaa

SEQ ID NO: 203 - protein, 505 aa, NICOTIANATABACUM
MDIQSSPFNLIALLLFISFLFILLKKWNTKIPKLPPGPWRLPLIGSLHHLKGKLPHHHLRDLARKYGPLMYLQLGEVPVVVISSPRIAKAVLKTHDLAFATRPRFMSSDIVFYKSRDISFAPYGDYWRQMRKILTQELLSNKMLKSFSTIRKDELSKLLSSIRLATASSAVNINEKLLWFTSCMTCRLAFGKICNDRDELIMLIREILALSGGFDVCDLFPSWKLLHNMSNMKARLTNVHHKYNLIMENIINEHKENHAAGIKGNNEFGGEDMIDALLRVKENNELQFPIENDNMKAVILDLFIAGTETSYTAIIWALSELMKHPSVMAKAQAEVRKVFKENENLDENDLDKLPYLKSVIKETLRMHPPVPLLGPRECREQTEIDGYTVPLKARVMVNAWAIGRDPESWEDPESFKPERFENISVDLTGNHYQFIPFGSGRRMCPGMSFGLVNTGHPLAQLLYLFDWKFPHKVNAADFHTTETSRVFAASKDDLYLIPTNHMEQE

SEQ ID NO: 204 - DNA, 1823 bp, NICOTIANATABACUM
aaccaaccttccttttcttacttagtaaaatggatattcagtcttctcctttcaacttaattgctttgctactcttcatttcatttctttttatcctattgaaaaagtggaataccaaaatcccaaagttacctccaggtccatggagacttccccttattggcagcctccatcacttgaaaggtaaactcccacaccatcatcttagagatttagcccgaaaatatggacctctcatgtatttacaacttggagaagttcctgtagttgtaatatcttcgccacgtatagcaaaagctgtactaaaaactcatgatcttgcttttgcaacgaggcctcggttcatgtcctcggacattgtgttttacaaaagcagggacatatcattcgccccatatggcgattactggagacaaatgcgtaaaatattaacacaagaactcttgagtaacaagatgctcaagtcatttagcacaatccgaaaggatgagctctcgaagctcctctcgtcgattcgtttagcaacagcttcttctgcagtgaacataaacgaaaagcttctctggtttacaagttgcatgacttgtagattagcctttggaaaaatatgcaacgatcgtgatgaattgattatgttaataagggagatattagcattatcaggaggatttgatgtgtgtgatttgttcccttcatggaaattacttcacaatatgagcaacatgaaagctagattgacgaatgttcaccataagtataatctaattatggagaatatcatcaatgagcacaaagagaatcatgcagcagggataaagggaaataacgagtttggtggcgaagatatgattgatgctttactgagggttaaggagaataatgagcttcaatttcctatcgaaaatgacaacatgaaagcagtaattctggacttgtttattgctggaactgaaacttcatatactgcaattatatgggcactatcagaattgatgaagcacccaagtgttatggccaaggcacaagctgaagtgagaaaagtcttcaaagaaaatgaaaacttggacgaaaatgatcttgacaagttgccatacttaaaatcagtgatcaaagaaacactaaggatgcatcctccagttcctttattaggacctagagaatgcagagaacaaactgagattgatggatatactgtacctcttaaagctagagtaatggttaatgcatgggcaattggaagagatcctgaaagttgggaagatcctgaaagtttcaaacccgagcgatttgaaaatatttctgttgatcttacgggaaatcactatcagttcattcctttcggttcaggaagaagaatgtgtccaggaatgtcgtttggtttagttaacactgggcatcctttagctcagttgctctatctctttgactggaaattccctcataaggttaatgcagctgattttcacactactgaaacaagtagagtttttgcagcaagcaaagatgacctctacttgattccaacaaatcacatggagcaagagtagctctaaattgaattcttgtcttggaacaataaaagaagaaactccagcttggtctacattatttccttttgctttatattagtatgggtgtgttcagtctcttgtttttaagggtaccctgaaagataaagggctatataaaccagtgagactttttattggttgcaaggttttagatcaagccataagacagcatattttattccaccattttctatcatgtttaataaagttcctttcgtttattgttagaaaaaaaaaaaaaaaaaaaaaaaa

SEQ ID NO: 205 - protein, 505 aa, NICOTIANATABACUM; identical to SEQ ID NO: 203

SEQ ID NO: 206 - DNA, 1673 bp, NICOTIANATABACUM
atatgcaactgagatttgaagaataccaactaaccaaaatgcagttcttcagcctggtttccattttcctatttctatctttcctctttttgttaagggtatggaagaactccaatagccaaagcaaaaagttgccaccaggtccatggaaactaccaatactaggaagtatgcttcatatggttggtggactaccacaccatgtccttagagatttagccaaaaaatatggaccacttatgcaccttcaattaggtgaagtttctgcggttgtggttacttctcctgatacggcaaaagaagtattaaaaactcatgacatcgcttttgcgtctaggcctagccttttggccccggagattgtctgttacaataggtctgatctagccttttgcccctatggcgactattggagacaaatgcgtaaaatatgtgtcttggaagtgctcagtgccaagaatgttcggacatttagctctattaggcggaatgaagttcttcgtctcattaattttatccggtcatcttctggtgaacctattaatgttacggaaaggatctttttgttcacaagctccatgacatgtagatcagcgtttgggcaagtgttcaaagagcaagacaaatttatacaactaattaaagaagtgatactcttagcaggagggtttgatgtggctgacatattcccttcactgaagtttcttcatgtgctcagtggaatgaagggtaagattatgaatgcacaccataaggtagatgccattgttgagaatgtcatcaatgagcacaagaaaaatcttgcaattgggaaaactaatggagcgttaggaggtgaagatttaattgatgttcttctaagacttatgaatgatggaggccttcaatttcctatcaccaacgacaacatcaaagctataatttttgacatgtttgctgccgggacagagacttcatcgtcaacaattgtgtgggctatggtagaaatggtgaaaaatccagccgtattcgcgaaagctcaagcagaagtaagagaagcatttagaggaaaagaaactttcgatgaaaatgatgtggaggagctaaactacctaaagttagtaataaaagaaactctaagacttcatccaccggttccacttttgctcccaagagaatgtagggaagagacaaatataaacggctacactattcctgtaaagaccaaagtcatggttaatgtttgggctttgggaagagatccaaaatattggaatgacgcagaaacttttatgccagagagatttgagcagtgctctaaggattttgttggtaataattttgaatatcttccatttggtggcggaaggaggatttgtcctgggatttcgtttggcttagctaatgcttatttgccattggctcaattactatatcacttcgattggaaactccctgctggaatcgaaccaagcgacttggacttgactgagttggttggagtaactgccgctagaaaaagtgacctttacttggttgcgactccttatcaacctcctcaaaagtgatttaatggtttcaagtttttatttcctagcaaaccccactattgtcctatctttcttttggtgttttcggttttatctactctaatacatgcatcttttaccatataggaatgtaccatgttgtcg

SEQ ID NO: 207 - protein, 514 aa, NICOTIANATABACUM
MQLRFEEYQLTKMQFFSLVSIFLFLSFLFLLRVWKNSNSQSKKLPPGPWKLPILGSMLHMVGGLPHHVLRDLAKKYGPLMHLQLGEVSAVVVTSPDTAKEVLKTHDIAFASRPSLLAPEIVCYNRSDLAFCPYGDYWRQMRKICVLEVLSAKNVRTFSSIRRNEVLRLINFIRSSSGEPINVTERIFLFTSSMTCRSAFGQVFKEQDKFIQLIKEVILLAGGFDVADIFPSLKFLHVLSGMKGKIMNAHHKVDAIVENVINEHKKNLAIGKTNGALGGEDLIDVLLRLMNDGGLQFPITNDNIKAIIFDMFAAGTETSSSTIVWAMVEMVKNPAVFAKAQAEVREAFRGKETFDENDVEELNYLKLVIKETLRLHPPVPLLLPRECREETNINGYTIPVKTKVMVNVWALGRDPKYWNDAETFMPERFEQCSKDFVGNNFEYLPFGGGRRICPGISFGLANAYLPLAQLLYHFDWKLPAGIEPSDLDLTELVGVTAARKSDLYLVATPYQPPQK

SEQ ID NO: 208 - DNA, 1673 bp, NICOTIANATABACUM
atatgcaactgagatttgaagaataccaactaaccaaaatgcagttcttcagcttggtttccattttcctatttctatctttcctctttttgttaaggatatggaagaactccaatagccaaagcaaaaagttgccaccaggtccatggaaactaccaatactaggaagtatgcttcatatggttggtggactaccacaccatgtccttagagatttagccaaaaaatatggaccacttatgcaccttcaattaggtgaagtttctgcggttgtggttacttctcctgatacggcaaaagaagtattaaaaactcatgacatcgcttttgcgtctaggcctagccttttggccccggagattgtctgttacaataggtctgatctagccttttgcccctatggcgactattggagacaaatgcgtaaaatatgtgtcttggaagtgctcagtgccaagaatgttcggacatttagctctattaggcggaatgaagttcttcgtctcattaattttatccggtcatcttctggtgaacctattaatgttacggaaaggatctttttgttcacaagctccatgacatgtagatcagcgtttgggcaagtgttcaaagagcaagacaaatttatacaactaattaaagaagtgatactcttagcaggagggtttgatgtggctgacatattcccttcactgaagtttcttcatgtgctcagtggaatgaagggtaagattatgaatgcacaccataaggtagatgccattgttgagaatgtcatcaatgagcacaagaaaaatcttgcaattgggaaaactaatggagcgttaggaggtgaagatttaattgatgttcttctaagacttatgaatgatggaggccttcaatttcctatcaccaacgacaacatcaaagccataatttttgacatgtttgctgccgggacagagacttcatcgtcaacaattgtgtgggctatggtagaaatggtgaaaaatccagccgtattcgcgaaagctcaagcagaagtaagagaagcatttagaggaaaagaaactttcgatgaaaatgatgtggaggagctaaactacctaaagttagtaataaaagaaactctaagacttcatccaccggttccacttttgctcccaagagaatgtagggaagagacaaatataaacggctacactattcctgtaaagaccaaagtcatggttaatgtttgggctttgggaagagatccaaaatattggaatgacgcagaaacttttatgccagagagatttgagcagtgctctaaggattttgttggtaataattttgaatatcttccatttggtggcggaaggaggatttgtcctgggatttcgtttggcttagctaatgcttatttgccattggctcaattactatatcacttcgattggaaactccctgctggaatcgaaccaagcgacttggacttgactgagttggttggagtaactgccgctagaaaaagtgacctttacttggttgcgactccttatcaacctcctcaaaagtgatttaatggtttcaagtttttatttcctagcaaaccccactattgtcctatctttcttttggtgttttcggttttatctactctaatacatgcatcttttaccatataggaatgtaccatgttgtcg

SEQ ID NO: 209 - protein, 514 aa, NICOTIANATABACUM
MQLRFEEYQLTKMQFFSLVSIFLFLSFLFLLRIWKNSNSQSKKLPPGPWKLPILGSMLHMVGGLPHHVLRDLAKKYGPLMHLQLGEVSAVVVTSPDTAKEVLKTHDIAFASRPSLLAPEIVCYNRSDLAFCPYGDYWRQMRKICVLEVLSAKNVRTFSSIRRNEVLRLINFIRSSSGEPINVTERIFLFTSSMTCRSAFGQVFKEQDKFIQLIKEVILLAGGFDVADIFPSLKFLHVLSGMKGKIMNAHHKVDAIVENVINEHKKNLAIGKTNGALGGEDLIDVLLRLMNDGGLQFPITNDNIKAIIFDMFAAGTETSSSTIVWAMVEMVKNPAVFAKAQAEVREAFRGKETFDENDVEELNYLKLVIKETLRLHPPVPLLLPRECREETNINGYTIPVKTKVMVNVWALGRDPKYWNDAETFMPERFEQCSKDFVGNNFEYLPFGGGRRICPGISFGLANAYLPLAQLLYHFDWKLPAGIEPSDLDLTELVGVTAARKSDLYLVATPYQPPQK

SEQ ID NO: 210 - DNA, 1673 bp, NICOTIANATABACUM
atatgcaactgagatttgaagaataccaactaaccaaagtgcagttcttcagcttggtttccattttcctatttctatctttcctctttttgttaaggatatggaagaactccaatagccaaagcaaaaagttgccaccaggtccatggaaactaccaatactaggaagtatgcttcatatggttggtggactaccacaccatgtccttagagatttagccaaaaaatatggaccacttatgcaccttcaattaggtgaagtttctgcggttgtggttacttctcctgatacggcaaaagaagtattaaaaactcatgacatcgcttttgcgtctaggcctagccttttggccccggagattgtctgttacaataggtctgatctagccttttgcccctatggcgactattggagacaaatgcgtaaaatatgtgtcttggaagtgctcagtgccaagaatgttcggacatttagctctattaggcggaatgaagttcttcgtctcattaattttatccggtcatcttctggtgaacctattaatgttacggaaaggatctttttgttcacaagctccatgacatgtagatcagcgtttgggcaagtgttcaaagagcaagacaaatttatacaactaattaaagaagtgatactcttagcaggagggtttgatgtggctgacatattcccttcactgaagtttcttcatgtgctcagtggaatgaagggtaagattatgaatgcacaccataaggtagatgccattgttgagaatgtcatcaatgagcacaagaaaaatcttgcaattgggaaaactaatggagcgttaggaggtgaagatttaattgatgttcctctaagacttatgaatgatggaggccttcaatttcctatcaccaacgacaacatcaaagctataatttttgacatgtttgctgccgggacggagacttcatcgtcaacaattgtgtgggctatggtagaaatggtgaaaaatccagccgtattcgcgaaagctcaagcagaagtaagagaagcatttagaggaaaagaaactttcgatgaaaatgatgtggaggagctaaactacctaaagttagtaataaaagaaactctaagacttcatccaccggttccacttttgctcccaagagaatgtagggaagagacaaatataaacggctacactattcctgtaaagaccaaagtcatggttaatgtttgggctttgggaagagatccaaaatattggaatgacgcagaaacttttatgccagagagatttgagcagtgctctaaggattttgttggtaataattttgaatatcttccatttggtggcggaaggaggatttgtcctgggatttcgtttggcttagctaatgcttatttgccattggctcaattactatatcacttcgattggaaactccctgctggaatcgaaccaagcgacttggacttgactgagttggttggagtaactgccgctagaaaaagtgacctttacttggttgcgactccttatcaacctcctcaaaagtgatttaatggtttcaagtttttatttcctagcaaaccccactattgtcctatctttcttttggtgttttcggttttatctactctaatacatgcatcttttaccatataggaatgtaccatgttgtcg

SEQ ID NO: 211 - protein, 514 aa, NICOTIANATABACUM
MQLRFEEYQLTKVQFFSLVSIFLFLSFLFLLRIWKNSNSQSKKLPPGPWKLPILGSMLHMVGGLPHHVLRDLAKKYGPLMHLQLGEVSAVVVTSPDTAKEVLKTHDIAFASRPSLLAPEIVCYNRSDLAFCPYGDYWRQMRKICVLEVLSAKNVRTFSSIRRNEVLRLINFIRSSSGEPINVTERIFLFTSSMTCRSAFGQVFKEQDKFIQLIKEVILLAGGFDVADIFPSLKFLHVLSGMKGKIMNAHHKVDAIVENVINEHKKNLAIGKTNGALGGEDLIDVPLRLMNDGGLQFPITNDNIKAIIFDMFAAGTETSSSTIVWAMVEMVKNPAVFAKAQAEVREAFRGKETFDENDVEELNYLKLVIKETLRLHPPVPLLLPRECREETNINGYTIPVKTKVMVNVWALGRDPKYWNDAETFMPERFEQCSKDFVGNNFEYLPFGGGRRICPGISFGLANAYLPLAQLLYHFDWKLPAGIEPSDLDLTELVGVTAARKSDLYLVATPYQPPQK

SEQ ID NO: 212 - DNA, 1580 bp, NICOTIANATABACUM
gaaatgggaaatgctcacaacagcaaaattgcagcaatctgtttgataattttcttggtatataaagcatgggaattgttgaagtggatatggattaagccaaagaaactggagagttgcctcagaaaacagggactcaaaggaaattcctacaggctattctatggagatatgaaagaattgtccaaaagtctcaaggaaatcaattcaaagcccatcatcaatctatcaaatgaagtagccccaagaatcattccttattatcttgaaatcatccaaaaatatggtaaaagatgttttgtttggcaaggaccaacccccgcaatattaataacagagccagaattaataaaggagatatttggtaagaactatgtttttcagaagcctaataatcccaacccactgaccaagttattggctcgaggtgttgtaagctacgaggaagaaaaatgggcaaaacacagaaagatcttaaaccctgcctttcatatggagaagttgaagcatatgctaccagcattttacttgagctgtagtgagatgctgaacaaatgggaggagattatcccagtaaaagaatcaaatgagttggacatttggcctcatcttcaaagaatgacaagtgatgtgatttctcgtgctgcctttggtagtagctacgaagaaggaagaagaatatttgaacttcaagaagaacaagctgagtatctaacgaagacattcaattcagtttatatcccaggttccagattttttcccaataaaatgaacaaaagaatgaaagaatgtgaaaaggaagtacgagaaacaattacgtgtctaattgacaacagattaaaggcaaaagaagaaggcaatggcaaggccctcaatgatgacctactgggtatattattagagtcaaattctatagaaattgaagaacatggtaacaagaagtttggaatgagtatacctgaagtaattgaagagtgcaaattattctattttgctggccaagagactacatcagtattgcttgtgtggacactgattttgttagggagaaatccagaatggcaggaacgtgctagagaggaagtttttcaagcctttggaagtgataaaccaacttttgacgaattatatcgcttgaaaattgtgacgatgattttgtacgagtctttaaggttatatccaccaatagcaactcgtactcgaaggactaatgaagaaacaaaattaggggaactagatttaccaaagggtgcactgctctttataccaacaatcttattacatcttgacaaggaaatttggggtgaagatgcagatgagttcaatccggagagatttagcgaaggggtggcaaaggcaacaaaggggaaaatgacatattttccatttggtgcaggaccgcgaaaatgcattgggcaaaacttcgcgattttggaagcaaaaatggctatagctatgattctacaacgcttctccttcgagctctctccatcttatacacactctccatacactgtggtcactttgaaacccaaatatggtgctcccctaataatgcacaggctgtagtcctgtgagaa

SEQ ID NO: 213 - protein, 521 aa, NICOTIANATABACUM
MGNAHNSKIAAICLIIFLVYKAWELLKWIWIKPKKLESCLRKQGLKGNSYRLFYGDMKELSKSLKEINSKPIINLSNEVAPRIIPYYLEIIQKYGKRCFVWQGPTPAILITEPELIKEIFGKNYVFQKPNNPNPLTKLLARGVVSYEEEKWAKHRKILNPAFHMEKLKHMLPAFYLSCSEMLNKWEEIIPVKESNELDIWPHLQRMTSDVISRAAFGSSYEEGRRIFELQEEQAEYLTKTFNSVYIPGSRFFPNKMNKRMKECEKEVRETITCLIDNRLKAKEEGNGKALNDDLLGILLESNSIEIEEHGNKKFGMSIPEVIEECKLFYFAGQETTSVLLVWTLILLGRNPEWQERAREEVFQAFGSDKPTFDELYRLKIVTMILYESLRLYPPIATRTRRTNEETKLGELDLPKGALLFIPTILLHLDKEIWGEDADEFNPERFSEGVAKATKGKMTYFPFGAGPRKCIGQNFAILEAKMAIAMILQRFSFELSPSYTHSPYTVVTLKPKYGAPLIMHRL

SEQ ID NO: 214 - DNA, 1587 bp, NICOTIANATABACUM
atgctttctcccatagaagcctttgtaggactagtaaccttcacatttctcttatacttcctatggacaaaaaaatctcaaaaacttccaaaacccttaccaccgaaaatccccggaggatggccggtaatcggccatctttttcacttcaataacgacggcgacgaccgtccattagctcgaaagctcggagacttagctgataaatacggccccgttttcacttttcggctaggtcttccccttgtgctagttgtaagcagttacgaagctataaaagattgcttctctacaaatgatgccattttctccaatcgtccagctcttctttacggcgaataccttggctacaataatacaatgctttttctagcaaattacggaccttactggcgaaaaaatcgtaaattagtcattcaggaagttctctctgctagtcgtctcgaaaaattcaaacaagtgagattcaccagaattcaaacgagcattaagaatttatacactcgaattaatggaaattcgagtacgataaatctaactgattggttagaagaattgaattttggtctgatcgtgaaaatgatcgctgggaaaaattatgaatccggtaaaggagatgaacaagtggaaagatttaagaatgcgtttaaggattttatggttttatcaatggaatttgtattatgggatgcatttccaattccattatttaaatgggtggattttcaaggtcatattaaggcaatgaaaaggacatttaaggatatagattctgtttttcagaactggttagaggaacatattaataaaagagaaaaaatagaggttggtgcagaagggaatgaacaagatttcattgatgtggtgctttcaaaattgagtaaagaatatcttgatgaaggttactctcgtgatactgtcattaaagcaacagtttttagtttggtcttggatgcagcagacacagttgctcttcacataaattggggaatgacattattgataaacaatcaaaatgccttgatgaaagcacaagaagagatagacacaaaagttggtaaggatagatgggtagaagagagtgatattaaggatttagtatacctccaagctattgttaaaaaggtgttacgattatatccaccaggacctttgttagtaccacatgaaaatgtaaaggattgtgttgttagtggatatcacattcctaaagggactagattattcgcaaacgtcatgaaactgcagcgcgatcctaaactcttgtcaaatcctgataagttcgatccagagagattcatcgctggtgatattgacttccgtggtcaccactatgagtttatcccatttggttctggaagacgatcttgtccggggatgacttatgcattgcaagtggaacacctaacaatggcacatttaatccagggtttcaattacaaaactccaaatgacgaggccttggatatgaaggaaggtgcaggcataacaatacgtaaggtaaatccagtggaattgataataacgcctcgcttggcacctgagctttactaaaacctaagatgtttcatcttggttgatcattgt

SEQ ID NO: 215 - protein, 517 aa, NICOTIANATABACUM
MLSPIEAFVGLVTFTFLLYFLWTKKSQKLPKPLPPKIPGGWPVIGHLFHFNNDGDDRPLARKLGDLADKYGPVFTFRLGLPLVLVVSSYEAIKDCFSTNDAIFSNRPALLYGEYLGYNNTMLFLANYGPYWRKNRKLVIQEVLSASRLEKFKQVRFTRIQTSIKNLYTRINGNSSTINLTDWLEELNFGLIVKMIAGKNYESGKGDEQVERFKNAFKDFMVLSMEFVLWDAFPIPLFKWVDFQGHIKAMKRTFKDIDSVFQNWLEEHINKREKIEVGAEGNEQDFIDVVLSKLSKEYLDEGYSRDTVIKATVFSLVLDAADTVALHINWGMTLLINNQNALMKAQEEIDTKVGKDRWVEESDIKDLVYLQAIVKKVLRLYPPGPLLVPHENVKDCVVSGYHIPKGTRLFANVMKLQRDPKLLSNPDKFDPERFIAGDIDFRGHHYEFIPFGSGRRSCPGMTYALQVEHLTMAHLIQGFNYKTPNDEALDMKEGAGITIRKVNPVELIITPRLAPELY

SEQ ID NO: 216 - DNA, 1634 bp, NICOTIANATABACUM
gggagaaggccttcaatatggagataccatattacagcttaaaaattgcaatttcttcatttgcaattatctttgtactaagatgggcatggaaaatcttgaattatgtgtggttaaaaccaaaagaattggagaaatacctcagacagcagggtttcaaaggaaactcttacaaattcttgtttggggatatgaaagagacgaagaaaatgggtgaagaagctatgtctaagccaatcaatttctctcatgacatgatttggcctagagttatgccattcatccacaaaaccatcaccaattatggtaagaattgtattgtgtggtttgggccaagaccagcagtcctgatcacagacccggaacttgtaaaggaggtgctaacgaagaatttcgtctatcagaagccgcttggcaatccactcacaaagttggcagcaactggaattgcaggctatgaaacagataaatgggctacacatagaaggcttctcaatcctgcttttcaccttgacaagttgaagcatatgctacctgcattccaatttactgctagtgagatgttgagcaaattggagaaagttgtttcaccaaacggaacagagatagatgtgtggccatatttacaaactttgacaagtgatgccatttcaagaactgcgtttggaagtagttatgaagaaggaagaaagatttttgaccttcaaaaagaacaactttcactaattctagaagtttcacgcacaatatatattccaggatggaggtttttgccaacgaaaaggaacaaaaggatgaagcaaatatttaatgaagtacgagcactggtatttggaattattaagaaaaggatgagtatgattgaaaatggagaagcacctgatgatttattgggaatattattggcatccaatttaaaagaaatccaacaacatggaaacaacaagaaatttggtatgagtattgatgaggtgattgaagagtgtaaactcttctattttgctgggcaagagactacttcatctttacttgtatggactatgattttgttgtgcaaatatcctaattggcaagataaagctagagaagaggttttgcaagtgtttgggagtagggaagttgactatgacaagttgaatcagctaaaaatagtaactatgatcttaaacgaggtcttaaggttgtatccagcaggatatgtgattaatcgaatggtaaacaaagaaacaaagttagggaatttgtgtttaccagccggcgtacagctcgtgttaccaacaatgttgttgcaacatgatactgaaatatggggagatgatgcaatggagttcaatccagagagatttagtgatggaatatccaaagcaacaaaaggaaaacttgtgttttttccatttagttggggtccaagaatatgtattgggcaaaattttgctatgttagaggctaaaatggcaatggctatgattctgaaaacctatgcatttgaactctctccatcttatgctcatgctcctcatccactactacttcaacctcaatatggtgctcaattaattttgtacaagttgtagatatggtcaatctggaacttgttatggaacttttatcatcgtaatcaaccatattgaggg

SEQ ID NO: 217 - protein, 508 aa, NICOTIANATABACUM
MEIPYYSLKIAISSFAIIFVLRWAWKILNYVWLKPKELEKYLRQQGFKGNSYKFLFGDMKETKKMGEEAMSKPINFSHDMIWPRVMPFIHKTITNYGKNCIVWFGPRPAVLITDPELVKEPLGNPLTKLAATGIAGYETDKWATHRRLLNPAFHLDKLKHMLPAFQFTASEMLSKLEKVVSPNGTEIDVWPYLQTLTSDAISRTAFGSSYEEGRKIFDLQKEQLSLILEVSRTIYIPGWRFLPTKRNKRMKQIFNEVRALVFGIIKKRMSMIENGEAPDDLLGILLASNLKEIQQHGNNKKFGMSIDEVIEECKLFYFAGQETTSSLLVWTMILLCKYPNWQDKAREEVLQVFGSREVDYDKLNQLKIVTMILNEVLRLYPAGYVINRMVNKETKLGNLCLPAGVQLVLPTMLLQHDTEIWGDDAMEFNPERFSDGISKATKGKLVFFPFSWGPRICIGQNFAMLEAKMAMAMILKTYAFELSPSYAHAPHPLLLQPQYGAQLILYKL

SEQ ID NO: 218 - DNA, 1593 bp, NICOTIANATABACUM
atggtttttcccatagaagcctttgtaggactagtaaccttcacatttctcttatacttcctatggacaaaaaaatctcaaaaacttccaaaacccttaccaccgaaaatccccggaggatggccggtaatcggccacctttttcacttcaataacgacggcgacgaccgtccattagctcgaaaactcggagacttagctgataaatacggccccgttttcacttttcggctaggtcttccccttgtgctagttgtaagcagttacgaagctacaaaagattgcttctctacaaatgacgccattttctccaatcgtccagcttttctttacggcgaataccttggctacaataatacaatgctttttctagcaaattacggaccttactggcgaaaaaatcgtaaattagtcattcaggaagttctctctgctagtcgtctcgaaaaattcaaacaagtgagattcaccagaattcaaacgagcattaagaatttatacactcgaattaatggaaattcgagtacgataaatctaactgattggttagaagaattgaattttggtctgatcgtgaaaatgatcgctgggaaaaattatgaatccggtaaaggagatgaacaagtggaaagatttaagaatgcgtttaaggattttatggttttatcaatggaatttgtattatgggatgcatttccaattccattatttaaatgggtggattttcaaggtcatattaagacaatgaaaaggacatttaaggatatagattctgtttttcagaactggttagaggaacatattaataaaagagaaaaaatggaggttggtgcagaagggaatgaacaagatttcattgatgtggtgctttcaaaattgagtaaagaatatcttgatgaaggttactctcgtgatactgtcattaaagcaacagtttttagtttggtcttggatgcagcagacacagttgctcttcacataaattggggaatgacattattgataaacaatcaaaatgccttgatgaaagcacaagaagagatagacacaaaagttggtaaggatagatgggtagaagagagtgatattaaggatttagtatacctccaagctattgttaaaaaggtgttacgattatatccaccaggacctttgttagtaccacatgaaaatgtaaaggattgtgttgttagtggatatcacattcctaaagggactagattattcgcaaacgtcatgaaactgcagcgcgatcctaaactcttgtcaaatcctgataagttcgatccagagagattcatcgctggtgatattgacttccgtggtcaccactatgagtttatcccatctggttctggaagacgatcttgtccggggatgacttatgcattgcaagtggaacacctaacaatggcacatttaatccagggtttcaattacaaaactccaaatgacgaggtcttggatatgaaggaaggtgcaggcataacaatacgtaaggtaaatccagtggaattgataataacgcctcgcttggcacctgagctttactaaaacctaagatctttcatcttggttgatcattgtttaata

SEQ ID NO: 219 - protein, 517 aa, NICOTIANATABACUM
MVFPIEAFVGLVTFTFLLYFLWTKKSQKLPKPLPPKIPGGWPVIGHLFHFNNDGDDRPLARKLGDLADKYGPVFTFRLGLPLVLVVSSYEATKDCFSTNDAIFSNRPAFLYGEYLGYNNTMLFLANYGPYWRKNRKLVIQEVLSASRLEKFKQVRFTRIQTSIKNLYTRINGNSSTINLTDWLEELNFGLIVKMIAGKNYESGKGDEQVERFKNAFKDFMVLSMEFVLWDAFPIPLFKWVDFQGHIKTMKRTFKDIDSVFQNWLEEHINKREKMEVGAEGNEQDFIDVVLSKLSKEYLDEGYSRDTVIKATVFSLVLDAADTVALHINWGMTLLINNQNALMKAQEEIDTKVGKDRWVEESDIKDLVYLQAIVKKVLRLYPPGPLLVPHENVKDCVVSGYHIPKGTRLFANVMKLQRDPKLLSNPDKFDPERFIAGDIDFRGHHYEFIPSGSGRRSCPGMTYALQVEHLTMAHLIQGFNYKTPNDEVLDMKEGAGITIRKVNPVELIITPRLAPELY

SEQ ID NO: 220 - DNA, 1580 bp, NICOTIANATABACUM
atgctttctcccatagaagccattgtaggactagtaaccttcacatttctcttcttcttcctatggacaaaaaaatctcaaaaaccttcaaaacccttaccaccgaaaatccccggaggatggccggtaatcggccatcttttccacttcaatgacgacggcgacgaccgtccattagctcgaaaactcggagacttagctgacaaatacggccccgttttcacttttcggctaggccttccccttgtcttagttgtaagcagttacgaagctgtaaaagactgtttctccacaaatgacgccattttttccaatcgtccagcttttctttacggcgattaccttggctacaataatgccatgctatttttggccaattacggaccttactggcgaaaaaatcgaaaattagttattcaggaagttctctccgctagtcgtctcgaaaaattcaaacacgtgagatttgcaagaattcaagcgagcatgaagaatttatatactcgaattgatggaaattcgagtacgataaatttaactgattggttagaagaattgaattttggtctgatcgtgaagatgatcgctggaaaaaattatgaatccggtaaaggagatgaacaagtggagagatttaagaaagcgtttaaggattttatgattttatcaatggagtttgtgttatgggatgcatttccaattccattatttaaatgggtggattttcaagggcatgttaaggctatgaaaaggacttttaaagatatagattctgtttttcagaattggttagaggaacatattaataaaagagaaaaaatggaggttaatgcagaagggaatgaacaagatttcattgatgtggtgctttcaaaaatgagtaatgaatatcttggtgaaggttactctcgtgatactgtcattgaagcaacggtgtttagtttggtcttggatgcagcagacacagttgctcttcacataaattggggaatggcattattgataaacaatcaaaaggccttgacgaaagcacaagaagagatagacacaaaagtttgtaaggacagatgggtagaagagagtgatattaaggatttggtatacctccaagctattgttaaagaagtgttacgattatatccaccaggacctttgttagtaccacacgaaaatgtagaagattgtgttgttagtggatatcacattcctaaagggacaagattattcgcaaacgtcatgaaactgcaacgtgatcctaaactctggtctgatcctgatactttcgatccagagagattcattgctactgatattgactttcgtggtcagtactataagtatatcccgtttggtcctggaagacgatcttgtccagggatgacttatgcattgcaagtggaacacttaacaatggcacatttgatccaaggtttcaattacagaactccaaatgacgagcccttggatatgaaggaaggtgcaggcataactatacgtaaggtaaatcctgtggaactgataatagcgcctcgcctggcacctgagctttattaaaacctaagatgtttcatcttggttga

SEQ ID NO: 221 - protein, 517 aa, NICOTIANATABACUM
MLSPIEAIVGLVTFTFLFFFLWTKKSQKPSKPLPPKIPGGWPVIGHLFHFNDDGDDRPLARKLGDLADKYGPVFTFRLGLPLVLVVSSYEAVKDCFSTNDAIFSNRPAFLYGDYLGYNNAMLFLANYGPYWRKNRKLVIQEVLSASRLEKFKHVRFARIQASMKNLYTRIDGNSSTINLTDWLEELNFGLIVKMIAGKNYESGKGDEQVERFKKAFKDFMILSMEFVLWDAFPIPLFKWVDFQGHVKAMKRTFKDIDSVFQNWLEEHINKREKMEVNAEGNEQDFIDVVLSKMSNEYLGEGYSRDTVIEATVFSLVLDAADTVALHINWGMALLINNQKALTKAQEEIDTKVCKDRWVEESDIKDLVYLQAIVKEVLRLYPPGPLLVPHENVEDCVVSGYHIPKGTRLFANVMKLQRDPKLWSDPDTFDPERFIATDIDFRGQYYKYIPFGPGRRSCPGMTYALQVEHLTMAHLIQGFNYRTPNDEPLDMKEGAGITIRKVNPVELIIAPRLAPELY

SEQ ID NO: 222 - DNA, 1639 bp, NICOTIANATABACUM
tttcatatacctttagtactcttgaaattttcaaataatggtttatcttctttctcccatagaagccattgtaggatttgtaaccttttcatttctattctactttctatggaccaaaaaacaatcaaaaatcttaaacccactacctccaaaaatcccaggtggatggccagtaatcggccatctcttttatttcaagaacaatggcgatgaagatcgccatttttctcaaaaactcggtgacttagctgacaaatatggtcccgtcttcactttccggttagggtttcgccgtttcttggcggtgagtagttatgaagctatgaaagaatgcttcactaccaatgatatccatttcgccgatcggccatctttactctacggagaatacctttgctataataacgccatgcttgctgttgccaaatatggcccttactggaaaaaaaatcgaaagttagtcaatcaagaagttctctccgttagtcggctcgaaaaattcaaacatgttagattttctataattcagaaaaatattaaacaattgtataattgtgattcaccaatggtgaagataaaccttagtgattggatagataaattgacattcgacatcattttgaaaatggttgttgggaagaactataataatggacatggagaaatactcaaagttgcttttcagaaattcatggttcaagctatggagatggagctctatgatgtttttcacattccatttttcaagtggttggatcttacagggaatattaaggctatgaaacaaactttcaaagacattgataatattatccaaggttggttagatgagcacattaagaagagagaaacaaaggatgttggaggtgaaaacgaacaagattttatagatgtggtgctttccaagatgagcgacgaacatcttggcgagggttactctcatgacacaaccatcaaagcaactgtattcactttggtcttggatgcaacagacacacttgcacttcatataaagtgggtaatggcgttaatgataaacaataagcatgtcatgaagaaagcacaagaagagatggacacaattgttggtagagatagatgggtagaagagagtgatatcaagaatttggtgtatctccaagcaattgtcaaagaagtattacgattacatccacccgcacctttgtcagtgcaacacctatctgtagaagattgtgttgtcaatgggtaccatattcctaaggggactgcactacttaccaatattatgaaactacagcgagatcctcaaacatggccaaatcctgataaattcgatccagagagattcctgacgactcatgctactattgactaccgcgggcagcactatgagtcgatcccctttggtacggggagacgagcttgtcccgcgatgaattattcattgcaagtggaacacctttcaattgctcatatgatccaaggtttcagttttgcaactacgaccaatgagcctttggatatgaaacaaggtgtgggtttaactttaccaaagaagactgatgttgaagtgctaattacacctcgccttcctcctacgctttatcaatattaagatgttttgttgtcgggattcgttctgatcaatccctcaatg

SEQ ID NO: 223 - protein, 519 aa, NICOTIANATABACUM
MVYLLSPIEAIVGFVTFSFLFYFLWTKKQSKILNPLPPKIPGGWPVIGHLFYFKNNGDEDRHFSQKLGDLADKYGPVFTFRLGFRRFLAVSSYEAMKECFTTNDIHFADRPSLLYGEYLCYNNAMLAVAKYGPYWKKNRKLVNQEVLSVSRLEKFKHVRFSIIQKNIKQLYNCDSPMVKINLSDWIDKLTFDIILKMVVGKNYNNGHGEILKVAFQKFMVQAMEMELYDVFHIPFFKWLDLTGNIKAMKQTFKDIDNIIQGWLDEHIKKRETKDVGGENEQDFIDVVLSKMSDEHLGEGYSHDTTIKATVFTLVLDATDTLALHIKWVMALMINNKHVMKKAQEEMDTIVGRDRWVEESDIKNLVYLQAIVKEVLRLHPPAPLSVQHLSVEDCVVNGYHIPKGTALLTNIMKLQRDPQTWPNPDKFDPERFLTTHATIDYRGQHYESIPFGTGRRACPAMNYSLQVEHLSIAHMIQGFSFATTTNEPLDMKQGVGLTLPKKTDVEVLITPRLPPTLYQY

SEQ ID NO: 224 - DNA, 1610 bp, NICOTIANATABACUM
ctttttctccccaaaaaagagctcatttcccttgtccccaaaaatggatcttctcttactagagaagaccttaattggtctcttctttgccattttaatcgctataattgtctctagacttcgttcaaagcgttttaagcttcccccaggaccaatcccagtaccagtttttggtaattggcttcaagttggtgatgatttaaaccacagaaatcttactgattttgccaaaaaatttggtgatcttttcttgttaagaatgggccagcgtaatttagttgttgtgtcatctcctgaattagctaaagaagttttacacacacaaggtgttgaatttggttcaagaacaagaaatgttgtatttgatatttttactggaaaaggtcaagatatggtttttactgtatatggtgaacactggagaaaaatgaggagaattatgactgtaccattttttactaataaagttgtgcagcaatatagaggggggtgggagtttgaagtggcaagtgtaattgaggatgtgaagaaaaatcctgaatctgctactaatgggattgtattaaggaggagattacaattgatgatgtataataatatgtttaggattatgtttgataggagatttgagagtgaagatgatcctttgtttgttaagcttaaggctttgaatggtgaaaggagtagattggctcagagttttgagtataattatggtgattttattcccattttgaggccttttttgagaggttatttgaagatctgtaaagaagttaaggagaagaggctgcagcttttcaaagattactttgttgatgaaagaaagaagctttcaaataccaagagcttggacagcaatgctctgaaatgtgcgattgatcacattcttgaggctcaacagaagggggagatcaatgaggacaacgttctttacattgttgaaaacatcaatgttgctgctatagaaaccacattatggtcaattgagtggggtatcgccgagttagtcaaccaccctcacatccaaaagaaactccgcgacgagattgacacagttcttggcccaggagtgcaagtgactgaaccagacacccacaagcttccataccttcaggctgtgatcaaggagacgcttcgtctccgtatggcaattcctctattagtcccacacatgaaccttcacgatgcaaagcttggcgggtttgatattccagcagagagcaaaatcttggttaacgcttggtggctagctaacaacccggctcattggaagaaacccgaagagttcagacccgagaggttcttcgaagaggagaagcacgttgaggccaatggcaatgacttcagatatcttccgtttggcgttggtaggaggagttgccctggaattatacttgcattgccaattcttggcattactttgggacgtttggttcagaactttgagctgttgcctcctccaggccagtcgaagctcgacaccacagagaaaggtggacagttcagtctccatattttgaagcattccaccattgtgttgaaaccaaggtcttgctgaactttctgatcctaatcaattaaggggttgaagaaattttataattatg

SEQ ID NO: 225 - protein, 505 aa, NICOTIANATABACUM
MDLLLLEKTLIGLFFAILIAIIVSRLRSKRFKLPPGPIPVPVFGNWLQVGDDLNHRNLTDFAKKFGDLFLLRMGQRNLVVVSSPELAKEVLHTQGVEFGSRTRNVVFDIFTGKGQDMVFTVYGEHWRKMRRIMTVPFFTNKVVQQYRGGWEFEVASVIEDVKKNPESATNGIVLRRRLQLMMYNNMFRIMFDRRFESEDDPLFVKLKALNGERSRLAQSFEYNYGDFIPILRPFLRGYLKICKEVKEKRLQLFKDYFVDERKKLSNTKSLDSNALKCAIDHILEAQQKGEINEDNVLYIVENINVAAIETTLWSIEWGIAELVNHPHIQKKLRDEIDTVLGPGVQVTEPDTHKLPYLQAVIKETLRLRMAIPLLVPHMNLHDAKLGGFDIPAESKILVNAWWLANNPAHWKKPEEFRPERFFEEEKHVEANGNDFRYLPFGVGRRSCPGIILALPILGITLGRLVQNFELLPPPGQSKLDTTEKGGQFSLHILKHSTIVLKPRSC

SEQ ID NO: 226 - DNA, 1595 bp, NICOTIANATABACUM
aacaataaaaatggagacattatttaacatcaaagttgcagtttcattagtaattgtgataatttttctgagatgggtatggaaattcttgaattgggtgtggattcaaccaaagaaaatggaaaaaagactaaaaatggaaggtttcaaaggaagctcatataagctattatttggagatatgaaagaaataaatacaatggttgaagaagccaaaaccaagcctatgaattttaccaatgattatgtggctagagtcttgcctcacttcacaaagttgatgctccaatatggcaagaatagctttatgtggttagggccaaaaccaacaatgtttatcacagaccctgaactaataagggagatcttgtcaaaaagttacatataccaggagattcaaggcaatccaatcactaagttgctagcacaaggactagtaagttatgaagcagagaaatgggctaagcatagaaaaattatcaatcctgcatttcaccttgacaagttgaagcatatgctaccatcattctacttgagttgttgtgacatgctcagaaaatgggaaagtatagcttcatcagagggatcagaaatagacgtgtggccttttctggaaacgttgacaagcgatgctatttcaagaacagcttttggtagtaactatgaagacgggagacagatatttgagcttcaaaaagaacaagctgagttgattttacaagcagcgcgatggctttacatccccggatggaggtttgtgccaacaaagaggaacaagaggatgaagcaaatcgctaaagaagtacgatcattagtgttgggaataatcaataagagaataagggaaatgaaagcaggggaagctgcaaaagatgacttactgggaatactattggaatctaatttcaaagaaatccaaatgcacggaaacaagaactttggcatgactatcgacgaagtgattgaagagtgcaagttattttactttgctgggcaagaaactacttcagttttgcttgtttggactttgattttactgagtaagcatgtcgattggcaagaaagagctagagaagaagttcatcaagtctttggaagtaacaaacctgattatgacgcattgaatcagttgaaagttgtaacgatgatattcaacgaggttttaaggttgtacccaccgggaattaccataagtcgaactgtacacgaggataccaaattagggaacttgtcattgccagcagggatacagcttgtgttacctgcaatttggttgcatcatgacaatgaaatatggggagatgatgcaaaggagttcaaaccagagaggtttagtgaaggagttaataaagcaacaaagggtaaatttgcatattttccatttagttggggaccaagaatatgtgttggactgaattttgcaatgttagaggcaaaaatggcacttgcattgattctacaacactatgcttttgagctctctccatcttatgcacatgctcctcatacaattatcactctgcaacctcaacatggtgctcctttgattttgcgcaagctgtagcgcggatatattgattggttatctactgtag

SEQ ID NO: 227 - protein, 514 aa, NICOTIANATABACUM; identical to SEQ ID NO: 209

SEQ ID NO: 228 - DNA, 1601 bp, NICOTIANATABACUM
gaattatttcacgtgttgtattccttgtctatgataggaagctcgttacctcagcgtacaaaccccaaataaaaaatgaatttccttgtggtgttagcttctctctttctctttgtgttcctaatgaggataagcaaagcaaaaaagctccctccaggtccaaggaaactgcctataataggaaaccttcatcaaattggaaaattacctcatcgttcacttcaaaaactttctaatgaatatggggatttcattttcttgcaattaggttctgtaccgactgtggttgtctcctcagctgacattgcccgagagatctttagaactcacgaccttgttttctcaggccgtcctgctttatatgctgccagaaaactttcctacaattgctacaacgtttcatttgcaccctatggtaattactggagagaggctcggaaaattctagtgttggagttgctaagtacaaagagagtacaaagtttcgaggcaattcgagacgaggaagtaagtagcttggttcaaattatctgtagttccttgagctcacctgttaacataagcacattagcactatccttggcaaataacgttgtttgtcgagtggcttttgggaaagggagtgctgaaggaggaaatgattatgaggataggaagtttaatgaaattctatatgagacacaagaattattgggtgagtttaacgttgctgattattttcctcggatggcatggattaacaaaataaatgggtttgatgaacgattggaaaataattttagggaattggataagttttatgacaaagtaatagaagatcatcttaattcatgtagctggatgaaacaaagggatgatgaagacgttattgatgtattgcttcgaattcaaaaggatccaagccaagaaattcctctcaaagatgatcacattaagggccttcttgcggatatattcatagctggaactgatacatcatcaacaaccatagaatgggcaatgtcagaactcataaaaaatccaagagtcttgagaaaagctcaagaggaagttagagaagtttctaagggaaaacaaaaggtccaagaaagtgatctttgcaaactagattacttgaaattggtcatcaaagaaacctttagactacacccaccagtcccattactagtccctcgagtaacaacagccagctgcaaaataatggaatacgaaattccagtaaatacaagagtcttcatcaacgcgacagcaaatgggacaaatccaaaatactgggaaaatccattgacattcttgccagagagattcttggataaggagattgattacagaggcaaaaattttgagttgttgccatttggggcagggagaagagggtgtccaggaattaatttttcaataccacttgttgagcttgcacttgctaatctattgtttcattataattggtcacttcctgaagggatgctagctaaggatgttgatatggaagaagctttggggattaccatgcacaagaaatctcccctttgcttagtagcttctcattatacttgttgagattttaaaagattttagcatagctatatatagcttgaagt

SEQ ID NO: 229 - protein, 494 aa, NICOTIANATABACUM
MNFLVVLASLFLFVFLMRISKAKKLPPGPRKLPIIGNLHQIGKLPHRSLQKLSNEYGDFIFLQLGSVPTVVVSSADIAREIFRTHDLVFSGRPALYAARKLSYNCYNVSFAPYGNYWREARKILVLELLSTKRVQSFEAIRDEEVSSLVQIICSSLSSPVNISTLALSLANNVVCRVAFGKGSAEGGNDYEDRKFNEILYETQELLGEFNVADYFPRMAWINKINGFDERLENNFRELDKFYDKVIEDHLNSCSWMKQRDDEDVIDVLLRIQKDPSQEIPLKDDHIKGLLADIFIAGTDTSSTTIEWAMSELIKNPRVLRKAQEEVREVSKGKQKVQESDLCKLDYLKLVIKETFRLHPPVPLLVPRVTTASCKIMEYEIPVNTRVFINATANGTNPKYWENPLTFLPERFLDKEIDYRGKNFELLPFGAGRRGCPGINFSIPLVELALANLLFHYNWSLPEGMLAKDVDMEEALGITMHKKSPLCLVASHYTC

SEQ ID NO: 230 - DNA, 1570 bp, NICOTIANATABACUM
caaagactaaaagatgtcggtctttgcggttatttcattctttctacttctgttttttcttttcaaatcatatttgccctcatcgaaaacaaagaaaaattctccaccatctccttcaaagcttccgttaatcggtcacttccacaaactaggcttacaacctcaccgttctctacaaaaactatcaaatgaacatggtcccatgatgatgcttcaattcggtagcgtacctgtgcttatcgcttcatcagctgaagctgcttccgaaatcatgaaaacccaagatttgtcttttgcaaacaaacccatttcaaccattcctagcaagcttttcttcggcccaaaggacgttgccttcaccccatatggggattactggaggaatgccagaagcatttgcatgcttcagcttttgaacaacaaaagagtccagtcttttcgaaagataagggaagaagagacttctcttcttctccagaggattagggaatcgccaaattcagaagtcgatttaacggagctgttcgtttccatgactaacgacatagtttgcagggtggccttaggaaggaagtattgtgatggggaagaagggaggaaattcaagtctttgctgttagagtttgtggaattgttgggagtttttaacattggagattacatgccgtggcttgcatggatgaatcgtttcaatggtttgaatgccaaagtggataaagtggcgaaagagtttgatgcatttttggaggatgtgattgaggaacacggaggaaataagaaatcagacactgaagctgaaggggcagacttcgtggatatattattgcaggttcacaaagaaaacaaggctggttttcaagtcgaaatggatgcaatcaaagctattatcatggatatgtttgctgcgggaacagatacaacttccacgcttctagagtggacaatgaacgagctcttaagaaatccaaaaacattgaataagttgagagatgaggtgagacaagtgactcaagggaagacagaggtaacagaggatgacttagagaaaatgccgtatttaagagcagcagttaaggagagttccaggctacactctccagtgccacttctacctcgagaagcaattaaggatgcaaaggttttgggctacgatatagctgcagggactcaagtcctcgtttgtccatgggcaatctcaagagatccaaacctttgggaaaatccagaggagtttcaacctgaaagattcttggatacttccatagattacaaaggcttacatttcgagttaattccattcggtgcaggtcggaggggttgccctggcatcacatttgctaagtttgtgaatgagctagcattggcaagattaatgttccattttgatttctcgctaccaaaaggagttaagcatgaggatttggacgtggaggaagctgctggaattactgttagaaggaagttcccccttttagccgtcgccactccatgctcgtgatttttattttagagctcattctatgccttaaaaactactactagataactgcgtagtaaataatgcttggta

SEQ ID NO: 231 - protein, 494 aa, NICOTIANATABACUM
MSVFAVISFFLLLFFLFKSYLPSSKTKKNSPPSPSKLPLIGHFHKLGLQPHRSLQKLSNEHGPMMMLQFGSVPVLIASSAEAASEIMKTQDLSFANKPISTIPSKLFFGPKDVAFTPYGDYWRNARSICMLQLLNNKRVQSFRKIREEETSLLLQRIRESPNSEVDLTELFVSMTNDIVCRVALGRKYCDGEEGRKFKSLLLEFVELLGVFNIGDYMPWLAWMNRFNGLNAKVDKVAKEFDAFLEDVIEEHGGNKKSDTEAEGADFVDILLQVHKENKAGFQVEMDAIKAIIMDMFAAGTDTTSTLLEWTMNELLRNPKTLNKLRDEVRQVTQGKTEVTEDDLEKMPYLRAAVKESSRLHSPVPLLPREAIKDAKVLGYDIAAGTQVLVCPWAISRDPNLWENPEEFQPERFLDTSIDYKGLHFELIPFGAGRRGCPGITFAKFVNELALARLMFHFDFSLPKGVKHEDLDVEEAAGITVRRKFPLLAVATPCS

SEQ ID NO: 232 - DNA, 1585 bp, NICOTIANATABACUM
attatccatcacctaaaatggagaattcttgggtttttctagccttggcagggctatctgcattagcttttctctgtaaaataatcacctgtcgaagaccggttaaccggaaaataccaccaggtccaaaaccatggcccatcattggcaatttgaacctacttggtcctataccacatcaatcttttgacttgctttccaaaaaatatggagagttgatgctgctgaaatttggctccaggccagttcttgttgcttcatctgctgaaatggcaaaacagtttttaaaagtacatgatgctaatttcgcctcccgtcctatgctagctggtggaaagtatacaagctataactattgtgacatgacatgggcaccctatggtccctattggcgccaagcacgacgaatttaccttaaccagatatttactccgaaaaggctagactcgttcgagtacattcgtgttgaagaaaggcaggccttgatttcccagctgaattcccttgctggaaagccattttttctcaaagaccatttgtcgcgatttagcctctgcagcatgacaaggatggttttgagcaacaagtactttggtgaatcaacagttagagtagaagatttgcagtacctggtagatcaatggttcttacttaatggtgctttcaacattggagattggattccatggctcagcttcttggacctacaaggctatgtgaaacaaatgaaggctttgaaaagaacttttgataagttccacaacattgtgctagatgatcgcagggctaagaagaatgcagagaagaactttgtcccaaaagacatggttgatgtcttgttgaagatggctgaagatcctaatctggaagtcaaactcactaatgactgtgtcaaagggttaatgcaggatttactaactggaggaacagatagcttaacagcagcagtgcaatgggcatttcaagaacttcttagacggccaagggttattgagaaggcaaccgaagagcttgaccggattgtcgggaaagagagatgggtagaagagaaagattgctcgcagctatcttacgttgaagcaatcctcaaggaaacactaaggttacatcctctaggaactatgctagcaccgcattgtgctatagaagattgtaacgtggctggttatgacatacagaaaggaacgaccgttctggtgaatgtttggaccattggaagggacccaaaatactgggatagagcacaagagtttctccccgagagattcttagagaacgacattgatatggacggacataactttgctttcttgccatttggctcggggcgaaggaggtgccctggctatagccttggacttaaggttatccgagtaacattagccaacatgttgcatggattcaactggaaattacctgaaggtatgaagccagaagatataagtgtggaagaacattatgggctcactacacatcctaagtttcctgttcctgtgatcttggaatctagactttcttcagatctctattcccccatcacttaatcctaagtgcttcctattatagcatcatatcaatatccctc

SEQ ID NO: 233 - protein, 508 aa, NICOTIANATABACUM
MENSWVFLALAGLSALAFLCKIITCRRPVNRKIPPGPKPWPIIGNLNLLGPIPHQSFDLLSKKYGELMLLKFGSRPVLVASSAEMAKQFLKVHDANFASRPMLAGGKYTSYNYCDMTWAPYGPYWRQARRIYLNQIFTPKRLDSFEYIRVEERQALISQLNSLAGKPFFLKDHLSRFSLCSMTRMVLSNKYFGESTVRVEDLQYLVDQWFLLNGAFNIGDWIPWLSFLDLQGYVKQMKALKRTFDKFHNIVLDDRRAKKNAEKNFVPKDMVDVLLKMAEDPNLEVKLTNDCVKGLMQDLLTGGTDSLTAAVQWAFQELLRRPRVIEKATEELDRIVGKERWVEEKDCSQLSYVEAILKETLRLHPLGTMLAPHCAIEDCNVAGYDIQKGTTVLVNVWTIGRDPKYWDRAQEFLPERFLENDIDMDGHNFAFLPFGSGRRRCPGYSLGLKVIRVTLANMLHGFNWKLPEGMKPEDISVEEHYGLTTHPKFPVPVILESRLSSDLYSPIT

SEQ ID NO: 234 - DNA, 1591 bp, NICOTIANATABACUM
ctcattatccatcacctaaaatggagaattcttgggtttttctagccttggcagggctatctgcattagcttttctctgtaaaataatcacctgtcgaagaccggttaaccggaaaataccaccaggtccaaaaccatggcccatcattggcaatttgaacctacttggtcctataccacatcaatcttttgacttgctttccaaaaaatatggagagttgatgctgctgaaatttggctccaggccagttcttgttgcttcatctgctgaaatggcaaaacagtttttaaaagtacatgatgctaatttcgcctcccgtcctatgctagctggtggaaagtatacaagctataactattgtgacatgacatgggcaccctatggtccctattggcgccaagcacgacgacgaatttaccttaaccagatatttactccgaaaaggctagactcgttcgagtacattcgtgttgaagaaaggcaggccttgatttcccagctgaattcccttgctggaaagccattttttctcaaagaccatttgtcgcgatttagcctctgcagcatgacaaggatggttttgagcaacaagtattttggtgaatcaacagttagagtagaagatttgcagtacctggtagatcaatggttcttacttaatggtgctttcaacattggagattggattccatggctcagcttcttggacctacaaggctatgtgaaacaaatgaaggctttgaaaagaacttttgataagttccacaacattgtgctagatgatcacagggctaagaagaatgcagagaagaactttgtcccaaaagacatggttgatgtcttgttgaagatggctgaagatcctaatctggaagtcaaactcactaatgactgtgtcaaagggttaatgcaggatttactaactggaggaacagatagcttaacagcagcagtgcaatgggcatttcaagaacttcttagacagccaagggttattgagaaggcaaccgaagagcttgaccggattgtcgggaaagagagatgggtagaagagaaagattgctcgcagctatcttacgttgaagcaatcctcaaggaaacactaaggttacatcctctaggaactatgctagcaccgcattgtgctatagaagattgtaacgtggctggttatgacatacagaaaggaacgaccgttctggtgaatgtttggaccattggaagggacccaaaatactgggatagagcacaagagtttctccccgagagattcttagagaacgacattgatatggacggacataactttgctttcttgccatttggctcggggcgaaggaggtgccctggctatagccttggacttaaggttatccgagtaacattagccaacatgttgcatggattcaactggaaattacctgaaggtatgaagccagaagatataagtgtggaagaacattatgggctcactacacatcctaagtttcctgttcctgtgatcttggaatctagactttcttcagatctctattcccccatcacttaatcctaagtgcttcctattatagcatcatatcaatatccctc

SEQ ID NO: 235 - protein, 509 aa, NICOTIANATABACUM
MENSWVFLALAGLSALAFLCKIITCRRPVNRKIPPGPKPWPIIGNLNLLGPIPHQSFDLLSKKYGELMLLKFGSRPVLVASSAEMAKQFLKVHDANFASRPMLAGGKYTSYNYCDMTWAPYGPYWRQARRRIYLNQIFTPKRLDSFEYIRVEERQALISQLNSLAGKPFFLKDHLSRFSLCSMTRMVLSNKYFGESTVRVEDLQYLVDQWFLLNGAFNIGDWIPWLSFLDLQGYVKQMKALKRTFDKFHNIVLDDHRAKKNAEKNFVPKDMVDVLLKMAEDPNLEVKLTNDCVKGLMQDLLTGGTDSLTAAVQWAFQELLRQPRVIEKATEELDRIVGKERWVEEKDCSQLSYVEAILKETLRLHPLGTMLAPHCAIEDCNVAGYDIQKGTTVLVNVWTIGRDPKYWDRAQEFLPERFLENDIDMDGHNFAFLPFGSGRRRCPGYSLGLKVIRVTLANMLHGFNWKLPEGMKPEDISVEEHYGLTTHPKFPVPVILESRLSSDLYSPIT

SEQ ID NO: 236 - DNA, 1615 bp, NICOTIANATABACUM
tgataatgctctttctactctttgtagcccttcctttcattcttatttttcttcttcctaaattcaaaaatggtggaaataacagattgccaccaggtcctataggtttaccattcattggaaatttgcatcaatacgatagtataactcctcatatctatttttggaaactttcaaaaaaatatggcaaaatcttctcattaaaacttgcttctactaatgtggtagtagtttcttcagcaaaattagcaaaagaagtattgaaaaaacaagatttaatattttgtagtagaccatctattcttggccaacaaaaactgtcttattatggtcgtgatattgcttttaatgattattggagagaaatgagaaaaatttgtgttcttcatctttttagtttaaaaaaagttcaattatttagtccaattcgtgaagatgaagtttttagaatgattaagaaaatatcaaaacaagcttctacttcacaaattattaatttgagtaatttaatgatttcattaacaagtacaattatttgtagagttgcttttggtgttaggattgaagaagaagcacatgcaaggaagagatttgattttcttttggccgaggcacaagaaatgatggctagtttctttgtatctgatttttttccctttttaagttggattgataaattaagtggattgacatatagacttgagaggaatttcaaggatttggataatttttatgaagaactcattgagcaacatcaaaatcctaataagccaaaatatatggaaggagatattgttgatcttttgctacaattgaagaaagagaaattaacaccacttgatctcactatggaagatataaaaggaattctcatgaatgtgttagttgcaggatcagacactagtgcagctgctactgtttgggcaatgacagccttgataaagaatcctaaagccatggaaaaagttcaattagaaatcagaaaatcagttgggaagaaaggcattgtaaatgaagaagatgtccaaaacatcccttattttaaagcagtgataaaggaaatatttagattgtatccaccagctccacttttagttccaagagaatcaatggaaaaaaccatattagaaggttatgaaattcggccaagaaccatagttcatgttaacgcttgggctatagcaagggatcctgaaatatgggaaaatccagatgaatttatacctgagagatttttgaatagcagtatcgattacaagggtcaagattttgagttacttccatttggtgcaggcagaagaggttgcccaggtattgcacttggggttgcatccatggaacttgctttgtcaaatcttctttatgcatttgattgggagttgccttatggagtaaaaaaagaagacatcgacacaaacgttaggcctggaattgccatgcacaagaaaaacgaactttgccttgtcccaaaaaattatttataaattatattgggacgtggatctcatgctagttctgtgcggtcagctaagcttattatttttggctcaaattatgtatacataattagtacatgtttaaaatgtataaatatagtagaaccattctcatggtt

SEQ ID NO: 237 - protein, 492 aa, NICOTIANATABACUM
MLFLLFVALPFILIFLLPKFKNGGNNRLPPGPIGLPFIGNLHQYDSITPHIYFWKLSKKYGKIFSLKLASTNVVVVSSAKLAKEVLKKQDLIFCSRPSILGQQKLSYYGRDIAFNDYWREMRKICVLHLFSLKKVQLFSPIREDEVFRMIKKISKQASTSQIINLSNLMISLTSTIICRVAFGVRIEEEAHARKRFDFLLAEAQEMMASFFVSDFFPFLSWIDKLSGLTYRLERNFKDLDNFYEELIEQHQNPNKPKYMEGDIVDLLLQLKKEKLTPLDLTMEDIKGILMNVLVAGSDTSAAATVWAMTALIKNPKAMEKVQLEIRKSVGKKGIVNEEDVQNIPYFKAVIKEIFRLYPPAPLLVPRESMEKTILEGYEIRPRTIVHVNAWAIARDPEIWENPDEFIPERFLNSSIDYKGQDFELLPFGAGRRGCPGIALGVASMELALSNLLYAFDWELPYGVKKEDIDTNVRPGIAMHKKNELCLVPKNYL

SEQ ID NO: 238 - DNA, 1624 bp, NICOTIANATABACUM
tgataatgctctttctactctttgtagcccttcctttcattcttatttttcttcttcctaaattcaaaaatggtggaaataacagattgccaccaggtcctataggtttaccattcattggaaatttgcatcaatatgatagtataactcctcatatctatttttggaaactttccaaaaaatatggcaaaatcttctcattaaaacttgcttctactaatgtggtagtagtttcttcagcaaaattagcaaaagaagtattgaaaaaacaagatttaatattttgtagtagaccatctattcttggccaacaaaaactgtcttattatggtcgtgatattgcttttgcaccttataatgattattggagagaaatgagaaaaatttgtgttcttcatctttttagtttaaaaaaagttcaattatttagtccaattcgtgaagatgaagtttttagaatgattaagaaaatatcaaaacaagcttctacttcacaaattattaatttgagtaatttaatgatttcattaacaagtacaattatttgtagagttgcttttggtgttaggtttgaagaagaagcacatgcaaggaagagatttgattttcttttggccgaggcacaagaaatgatggctagtttctttgtatctgatttttttccctttttaagttggattgataaattaagtggattgacatatagacttgagaggaatttcaaggatttggataatttttatgaagaactcattgagcaacatcaaaatcctaataagccaaaatatatggaaggagatattgttgatcttttgctacaattgaagaaagagaaattaacaccacttgatctcactatggaagatataaaaggaattctcatgaatgtgttagttgcaggatcagacactagtgcagctgctactgtttgggcaatgacagccttgataaagaatcctaaagccatggaaaaagttcaattagaaatcagaaaatcagttgggaagaaaggcattgtaaatgaagaagatgtccaaaacatcccttattttaaagcagtgataaaggaaatatttagattgtatccaccagctccacttttagttccaagagaatcaatggaaaaaaccatattagaaggttatgaaattcggccaagaaccatagttcatgttaacgcttgggctatagcaagggatcctgaaatatgggaaaatccagatgaatttatacctgagagatttttgaatagcagtatcgattacaagggtcaagattttgagttacttccatttggtgcaggcagaagaggttgcccaggtattgcacttggggttgcatccatggaacttgctttgtcaaatcttctttatgcatttgattgggagttgccttatggagtgaaaaaagaagacatcgacacaaacgttaggcctggaattgccatgcacaagaaaaacgaactttgccttgtcccaaaaaattatttataaattatattgggacgtggatctcatgctagttctgtgcggtcagctaagcttattatttttggctcaaattatgtatacataattagtacatgtttaaaatgtataaatatagtagaaccattctcatggtt

SEQ ID NO: 239 - protein, 495 aa, NICOTIANATABACUM
MLFLLFVALPFILIFLLPKFKNGGNNRLPPGPIGLPFIGNLHQYDSITPHIYFWKLSKKYGKIFSLKLASTNVVVVSSAKLAKEVLKKQDLIFCSRPSILGQQKLSYYGRDIAFAPYNDYWREMRKICVLHLFSLKKVQLFSPIREDEVFRMIKKISKQASTSQIINLSNLMISLTSTIICRVAFGVRFEEEAHARKRFDFLLAEAQEMMASFFVSDFFPFLSWIDKLSGLTYRLERNFKDLDNFYEELIEQHQNPNKPKYMEGDIVDLLLQLKKEKLTPLDLTMEDIKGILMNVLVAGSDTSAAATVWAMTALIKNPKAMEKVQLEIRKSVGKKGIVNEEDVQNIPYFKAVIKEIFRLYPPAPLLVPRESMEKTILEGYEIRPRTIVHVNAWAIARDPEIWENPDEFIPERFLNSSIDYKGQDFELLPFGAGRRGCPGIALGVASMELALSNLLYAFDWELPYGVKKEDIDTNVRPGIAMHKKNELCLVPKNYL

SEQ ID NO: 240 - DNA, 1627 bp, NICOTIANATABACUM
aaaattcataatggtttttcccatagaagcctttgtaggactagtaaccttcacatttctcttatacttcctatggacaaaaaaatctcaaaaacttccaaaacccttactaccgaaaatccccggaggatggccggtaatcggccatctttttcacttcaataacgacggcgacgaccgtccattagctcgaaaactcggagacttagctgataaatacggccccgttttcacttttcggctaggtcttccccttgtgctagttgtaagcagttacgaagctataaaagattgcttctctacaaatgacgccattttctccaatcgtccagcttttctttacggcgaataccttggctacaataatacaatgctttttctagcaaattacggaccttactggcgaaaaaatcgtaaattagtcattcaggaagttctctctgctagtcgtctcgaaaaattcaaacaagtgagattcaccagaattcaaacgagcattaagaatttatacactcgaattaatggaaattcgagtacgataaatctaactgattggttagaagaattggattttggtctgatcgtgaaaatgatcgctgggaaaaattatgaatccggtaaaggagatgaacaagtggaaagatttaagaatgcgtttaaggattttatggttttatcaatggaatttgtattatgggatgcatttccaattccattatttaaatgggtggattttcaaggtcatattaaggcaatgaaaaggacatttaaggatatagattctgtttttcagaactggttagaggaacatattaataaaagagaaaaaatggaggttggtgcagaagggaatgaacaagatttcattgatgtggtgctttcaaaattgagtaaagaatatcttgatgaaggttactctcgtgatactgtcattaaagcaacagtttttagtttggtcttggatgcagcagacacagttgctcttcacataaattggggaatgacattattgataaacaatcaaaatgccttgatgaaagcacaagaagagatagacacaaaagttggtaagtatagatgggtagaagagagtgatattaaggatttagtatacctccaagctattgttaaaaaggtgttacgattatatccaccaggacctttgttagtaccacatgaatatgtaaaggattgtgttgttagtggatatcacattcctaaagggactagattattcgcaaacgtcatgaaactgcagcgcgatcctaaactcttgtcaaatcctgataagttcgatccagagagattcatcgctggtgatatcgacttccgtggtcaccactatgagtttatcccatttggttctggaagacgatcttgtccggggatgacttatgcattgcaagtggaacacctaacaatggcacatttaatccagggtttcaattacaaaactccaaatgacgaggccttggatatgaaggaaggtgcaggcataacaatacgtaaggtaaatccggtggaattgataataacgcctcgcttggcacctgagctttactaaaacctaagatctttcatcttggttgatcattgtttaatactcctagatagatgggtattcatc

SEQ ID NO: 241 - protein, 517 aa, NICOTIANATABACUM
MVFPIEAFVGLVTFTFLLYFLWTKKSQKLPKPLLPKIPGGWPVIGHLFHFNNDGDDRPLARKLGDLADKYGPVFTFRLGLPLVLVVSSYEAIKDCFSTNDAIFSNRPAFLYGEYLGYNNTMLFLANYGPYWRKNRKLVIQEVLSASRLEKFKQVRFTRIQTSIKNLYTRINGNSSTINLTDWLEELDFGLIVKMIAGKNYESGKGDEQVERFKNAFKDFMVLSMEFVLWDAFPIPLFKWVDFQGHIKAMKRTFKDIDSVFQNWLEEHINKREKMEVGAEGNEQDFIDVVLSKLSKEYLDEGYSRDTVIKATVFSLVLDAADTVALHINWGMTLLINNQNALMKAQEEIDTKVGKYRWVEESDIKDLVYLQAIVKKVLRLYPPGPLLVPHEYVKDCVVSGYHIPKGTRLFANVMKLQRDPKLLSNPDKFDPERFIAGDIDFRGHHYEFIPFGSGRRSCPGMTYALQVEHLTMAHLIQGFNYKTPNDEALDMKEGAGITIRKVNPVELIITPRLAPELY

SEQ ID NO: 242 - DNA, 1594 bp, NICOTIANATABACUM
caaaaaatcatttctctcgtctaaaatggatcttctcttactagagaagaccttaattggtcttttctttgccattttaatcgctttaattgtctctaaacttcgttcaaagcgttttaagcttcctccaggaccaattccagtaccagtttttggtaattggcttcaagttggtgatgatttaaaccacagaaatcttactgattatgccaaaaaatttggcgatcttttcttgttaagaatgggtcaacgtaacttagttgttgtgtcatctcctgaattagctaaagaagttttacacacacaaggtgttgaatttggttcaagaacaagaaatgttgtgtttgatatttttactggaaaaggtcaagatatggtttttactgtatatggtgaacattggagaaaaatgaggagaattatgactgtaccattttttactaataaagttgtgcaacagtatagaggggggtgggagtttgaggtggcaagtgtaattgaggatgtgaaaaaaaatcctgaatctgctactaatgggatcgtattaaggaggagattacaattaatgatgtataataatatgtttaggattatgtttgataggagatttgagagtgaagatgatcctttgtttgttaagcttaaggctttgaatggtgaaaggagtagattggctcaaagttttgagtataattatggtgattttattccaattttgaggcctcttttgagaggttatttgaagatctgtaaagaagttaaggagaagaggctgcagcttttcaaagattactttgttgatgaaagaaagaagctttcaaataccaagagctcggacagcaatgccctaaaatgtgcgattgatcacattcttgaggctcaacagaagggagagatcaatgaggacaacgttctttacattgttgaaaacatcaatgttgctgcaattgaaacaacattatggtcaattgagtggggtatcgccgagctagtcaaccaccctcacatccaaaagaaactgcgcgacgagattgacacagttcttggaccaggagtgcaagtgactgaaccagacacccacaagcttccataccttcaggctgtgatcaaggaggcacttcgtctccgtatggcaattcctctattagtcccacacatgaaccttcacgacgcaaagcttggcgggcttgatattccagcagagagcaaaatcttggttaacgcttggtggttagctaacaacccggctcattggaagaaacccgaagagttcagacccgagaggttctttgaagaggagaagcatgttgaggccaatggcaatgacttcagatatcttccgtttggcgttggtaggaggagctgccctggaattatacttgcattgccaattcttggcatcactttgggacgtttggttcagaactttgagctgttgcctcctccaggccagtcgaagctcgacaccacagagaaaggtggacagttcagtctccacattttgaagcattccaccattgtgttgaaaccaaggtctttctgaactttgtgatcttattaattaaggggttctgaagaaatttgatagtgttgg

SEQ ID NO: 243 - protein, 505 aa, NICOTIANATABACUM
MDLLLLEKTLIGLFFAILIALIVSKLRSKRFKLPPGPIPVPVFGNWLQVGDDLNHRNLTDYAKKFGDLFLLRMGQRNLVVVSSPELAKEVLHTQGVEFGSRTRNVVFDIFTGKGQDMVFTVYGEHWRKMRRIMTVPFFTNKVVQQYRGGWEFEVASVIEDVKKNPESATNGIVLRRRLQLMMYNNMFRIMFDRRFESEDDPLFVKLKALNGERSRLAQSFEYNYGDFIPILRPLLRGYLKICKEVKEKRLQLFKDYFVDERKKLSNTKSSDSNALKCAIDHILEAQQKGEINEDNVLYIVENINVAAIETTLWSIEWGIAELVNHPHIQKKLRDEIDTVLGPGVQVTEPDTHKLPYLQAVIKEALRLRMAIPLLVPHMNLHDAKLGGLDIPAESKILVNAWWLANNPAHWKKPEEFRPERFFEEEKHVEANGNDFRYLPFGVGRRSCPGIILALPILGITLGRLVQNFELLPPPGQSKLDTTEKGGQFSLHILKHSTIVLKPRSF

SEQ ID NO: 244 - DNA, 1678 bp, NICOTIANATABACUM
aacattttgcaatatagttttcctagtcagttctagcctccttttccttagaaataatggattatcatatttctttccattttcaagctcttttagggcttttagcctttgtgttcttgtctattatcttatggagaagaacactcacttcaagaaaattagcccctgaaatcccaggggcatggcctattataggccatcttcgtcagctgagtggtactgataagaatatcccatttccccgaatattgggcgctttggcagataaatatggacctgtcttcacactgagaatagggatgtacccctatttgattgtcaacaattgggaagcagctaaggattgtctcacaacgcatgataaggacttcgctgcccgaccaacttctatggctggtgaaagcatcgggtacaagtatgcgaggtttacttatgctaattttggtccttattataaccaagtgcgcaaactagccctacaacatgtaccctcgagtactaaactcgagaaaatgaaacacatacgtgtttctgaattggaaactagcatcaaagaattatattctttgacgctgggcaaaaacaacatgcaaaaagtgaatataagtaaatggtttgaacaattgactttaaacataatcgtgaagacaatttgtggcaagagatatagcaacatagaggaggatgaagaggcacaacgtttcagaaaggcatttaagggcatcatgtttgttgtagggcaaattgttttatatgacgcaattccattcccattgttcaaatactttgatttccaaggtcatatacaattgatgaacaaaatttataaagacttagattctattcttcaaggatggttggatgatcatatgatgaacaaggatgtaaacaataaggatcaagatgccatagatgccatgcttaaggtaacacaacttaatgaattcaaagcctatggtttttctcaggccactgtgatcaagtcgacagtcttgagtttgatcttagatggaaatgacacaaccgctgttcatttgatatgggtaatgtccttattactgaacaatccacatgttatgaaacaaggccaagaagagatagacatgaaagtgggtaaagagaggtggattgaagatactgacataaaaaatttagtgtaccttcaggctatcgttaaagagacattgcgcttgtatccacctgttccttttcttttaccacacgaagcagtgcaagattgtaaagtgactggttaccacattcctaaaggtactcgtctatatatcaatgcgtggaaagtacatcgcgatcctgaaatttggtcagagcccgaaaagtttatgcccaatagattcttgactagcaaagcaaatatagatgctcgcggtcaaaattttgaatttataccgtttggttctgggagacggtcatgtccagggataggttttgcgactttagtgacacatctgacttttggtcgcttgcttcaaggttttgattttagtaagccatcaaacacgccaattgacatgacagaaggcgtaggcgttactttgcctaaggttaatcaagttgaagttctaattacccctcgtttaccttctaagctttatttattttgaaagtgcaaatcatcaatcatggcttgagtaattagttatactttaatatgtttctc

SEQ ID NO: 245 - protein, 521 aa, NICOTIANATABACUM
MDYHISFHFQALLGLLAFVFLSIILWRRTLTSRKLAPEIPGAWPIIGHLRQLSGTDKNIPFPRILGALADKYGPVFTLRIGMYPYLIVNNWEAAKDCLTTHDKDFAARPTSMAGESIGYKYARFTYANFGPYYNQVRKLALQHVPSSTKLEKMKHIRVSELETSIKELYSLTLGKNNMQKVNISKWFEQLTLNIIVKTICGKRYSNIEEDEEAQRFRKAFKGIMFVVGQIVLYDAIPFPLFKYFDFQGHIQLMNKIYKDLDSILQGWLDDHMMNKDVNNKDQDAIDAMLKVTQLNEFKAYGFSQATVIKSTVLSLILDGNDTTAVHLIWVMSLLLNNPHVMKQGQEEIDMKVGKERWIEDTDIKNLVYLQAIVKETLRLYPPVPFLLPHEAVQDCKVTGYHIPKGTRLYINAWKVHRDPEIWSEPEKFMPNRFLTSKANIDARGQNFEFIPFGSGRRSCPGIGFATLVTHLTFGRLLQGFDFSKPSNTPIDMTEGVGVTLPKVNQVEVLITPRLPSKLYLF

SEQ ID NO: 246 - DNA, 1537 bp, NICOTIANATABACUM
tgataatgctctttctactctttgtagcccttcctttcattcttatttttcttcttcctaaattcaaaaatggtggaaataacagattgccaccaggtcctataggtttaccattcattggaaatttgcatcaatatgatagtataactcctcatatctatttttggaaactttccaaaaaatatggcaaaatcttctcattaaaacttgcttctactaatgtggtagtagtttcttcagcaaaattagcaaaagaagtattgaaaaaacaagatttaatattttgtagtagaccatctattcttggccaacaaaaactgtcttattatggtcgtgatattgcttttgcaccttataatgattattggagagaaatgagaaaaatttgtgttcttcatctttttagtttaaaaaaagttcaattatttagtccaattcgtgaagatgaagtttttagaatgattaagaaaatatcaaaacaagcttctacttcacaaattattaatttgagtaatttaatgatttcattaacaagtacaattatttgtagagttgcttttggtgttaggtttgaagaagaagcacatgcaaggaagagatttgattttcttttggccgaggcacaagaaatgatggctagtttctttgtatctgatttttttccctttttaagttggattgataaattaagtggattgacatatagacttgagaggaatttcaaggatttggataatttttatgaagaactcattgagcaacatcaaaatcctaataagccaaaatatatggaaggagatattgttgatcttttgctacaattgaagaaagagaaattaacaccacttgatctcactatggaagatataaaaggaattctcatgaatgtgttagttgcaggatcagacactagtgcagctgctactgtttgggcaatgacagccttgataaagaatcctaaagccatggaaaaagttcaattagaaatcagaaaatcagttgggaagaaaggcattgtaaatgaagaagatgtccaaaacatcccttattttaaagcagtgataaaggaaatatttagattgtatccaccagctccacttttagttccaagagaatcaatggaaaaaaccatattagaaggttatgaaattcggccaagaaccatagttcatgttaacgcttgggctatagcaagggatcctgaaatatgggaaaatccagatgaatttatacctgagagatttttgaatagcagtaccgattacaagggtcaagattttgagttacttccatttggtgcaggcagaagaggttgcccaggtattgcacttggggttgcatccatggaacttgctttgtcaaatcttctttatgcatttgattgggagttgccttatggagtgaaaaaagaagacatcgacacaaacgttaggcctggaattgccatgcacaagaaaaacgaactttgccttgtcccaaaaaattatttataaattatattgggacgtggatctcaatttagttctgtgaggtcagc

SEQ ID NO: 247 - protein, 495 aa, NICOTIANATABACUM
MLFLLFVALPFILIFLLPKFKNGGNNRLPPGPIGLPFIGNLHQYDSITPHIYFWKLSKKYGKIFSLKLASTNVVVVSSAKLAKEVLKKQDLIFCSRPSILGQQKLSYYGRDIAFAPYNDYWREMRKICVLHLFSLKKVQLFSPIREDEVFRMIKKISKQASTSQIINLSNLMISLTSTIICRVAFGVRFEEEAHARKRFDFLLAEAQEMMASFFVSDFFPFLSWIDKLSGLTYRLERNFKDLDNFYEELIEQHQNPNKPKYMEGDIVDLLLQLKKEKLTPLDLTMEDIKGILMNVLVAGSDTSAAATVWAMTALIKNPKAMEKVQLEIRKSVGKKGIVNEEDVQNIPYFKAVIKEIFRLYPPAPLLVPRESMEKTILEGYEIRPRTIVHVNAWAIARDPEIWENPDEFIPERFLNSSTDYKGQDFELLPFGAGRRGCPGIALGVASMELALSNLLYAFDWELPYGVKKEDIDTNVRPGIAMHKKNELCLVPKNYL

SEQ ID NO: 248 - DNA, 1572 bp, NICOTIANATABACUM
ccaaaatcatggctctatctttcatattcatatccataaccctaatttttctagttcataaactctaccaccgtcttagattcaaactaccaccaggtccgcggccgttaccggtggtcggaaacctctacgacataaaaccggtgagattccggtgctttgccgattgggccaaaacttacggtccgattttctcagtatactttgggtcacagttaaatgttgtggtaacaacagctgaattagctaaagaagtattgaaagaaaatgaccagaatttagcagatagatttaggactagacctgcaaataatttgagcagaaatgggatggatttgatttgggctgattatgggcctcattatgtgaaagtaaggaagctctgtaatcttgagctttttactcctaaaagacttgaagctcttagacctattagagaagatgaagttactgctatggttgaaaacattttcaaggattgtactaagcctgataacacaggtaaaagcttgttgataagagagtacttaggatcagtagcattcaacaacattacaaggttaacatttgggaaaaggttcatgaactcaaaaggtgagattgatgagcaaggtcaagaattcaagggtattgtctctaatggcatcaaaattggcggaaaacttcccttggcagagtatgttccatggctccgttggtttttcacaatggaaaacgaggcactcgtgaagcactctgcacgtagagaccggttaacaagaatgatcatggatgaacacacactggctcgcaagaaaactggtgatactaagcagcattttgtcgatgcattgcttactcttcagaagcagtatgatcttagtgatgacactgttattggcctcctctgggatatgattacagcaggaatggacacaacaaccataacagtggaatgggcaatggcagaactagttaagaacccaagagtgcaactaaaagctcaagaggagcttgacagggtaatcggaacggatcgaatcatgtcagaaaccgatttctctaaacttccttacctacaatgtgtagccaaagaggctctaaggttgcaccctccaactcctctaatgcttcctcataaggccagtgccagtgtcaaaattggtggttatgacattcctaaggggtccatcgtgcacgtgaacgtttgggctgtcgctcgtgacccagccgtgtggaagaacccgttggagttcagaccagagcgcttccttgaggaagacgttgacatgaagggtcacgactatcggttattgccctttggtgcaggaaggcgtgtttgccccggtgcacaacttgctatcaacttggtcacatctatgttgggtcatttgttgcatcattttacatgggctccggccccgggggttaacccggaggatattgacttggaggagagccctggaacagtaacttacatgaaaaatccaatacaagctattccaactccaagattgcctgcacacttgtatggacgtgtgccagtggatatgtaaaacattttgttctttccctttttggttatatgatgag

SEQ ID NO: 249 - protein, 508 aa, NICOTIANATABACUM
MALSFIFISITLIFLVHKLYHRLRFKLPPGPRPLPVVGNLYDIKPVRFRCFADWAKTYGPIFSVYFGSQLNVVVTTAELAKEVLKENDQNLADRFRTRPANNLSRNGMDLIWADYGPHYVKVRKLCNLELFTPKRLEALRPIREDEVTAMVENIFKDCTKPDNTGKSLLIREYLGSVAFNNITRLTFGKRFMNSKGEIDEQGQEFKGIVSNGIKIGGKLPLAEYVPWLRWFFTMENEALVKHSARRDRLTRMIMDEHTLARKKTGDTKQHFVDALLTLQKQYDLSDDTVIGLLWDMITAGMDTTTITVEWAMAELVKNPRVQLKAQEELDRVIGTDRIMSETDFSKLPYLQCVAKEALRLHPPTPLMLPHKASASVKIGGYDIPKGSIVHVNVWAVARDPAVWKNPLEFRPERFLEEDVDMKGHDYRLLPFGAGRRVCPGAQLAINLVTSMLGHLLHHFTWAPAPGVNPEDIDLEESPGTVTYMKNPIQAIPTPRLPAHLYGRVPVDM

SEQ ID NO: 250 - DNA, 1580 bp, NICOTIANATABACUM
aatcactaattttcatgtactctcataggtcaaaagtttcaaccaaaatcatggctctatccttcatattcatatccataaccctaatttttctagttcataaactctaccaccgtcttagattcaaactaccaccaggtccgcggccgttaccggtggtcggaaacctctacgacatagaaccggtgagattccggtgctttgccgattgggccaaaacttacggtccgattttctcagtatactttgggtcacagttaaatgttgtggtaacaacagctgaattagctaaagaagtattgaaagaaaatgaccagaatttagcagatagatttaggactagacctgcaaataatttgagcagaaatgggatggatttgatttgggctgattatgggcctcattatgtgaaagtaaggaagctctgtaatcttgagctttttactcctaaaagacttgaagctcttagacctattagagaagatgaagttactgctatggttgaaaacattttcaaggattgtactaagcctgataacacaggtaaaagcttgttgataagagagtacttaggatcagtagcattcaacaacattacaaggttaacatttgggaaaaggttcatgaactcaaaaggtgagattgatgagcaaggtcaagaattcaagggtattgtctctaatggcatcaaaattggcggaaaacttcccttggcagagtatgttccatggctccgttggtttttcacaatggaaaacgaggcactcgtgaagcactctgcacgtagagaccggttaacaagaatgatcatggatgaacacacactggctcgcaagaaaactggtgatactaagcagcattttgtcgatgcattgcttactcttcagaagcagtatgatcttagtgatgacactgttattggcctcctctgggatatgattacagcaggaatggacacaacaaccataacagtggaatgggcaatggcagaactagttaagaacccaagagtgcaactaaaagctcaagaggagcttgacagggtaatcggaacggatcgaatcatgtcagaaaccgatttctctaaacttccttacctacaatgtgtagccaaagaggctctaaggttgcaccctccaactcctctaatgcttcctcatagggccagtgccagtgtcaaaattggtggttatgacattcctaaggggtccatcgtgcacgtgaacgtttgggctgtcgctcgtgacccagccgtgtggaagaacccgttggagttcagaccagagcgcttccttgaggaagacgttgacatgaagggtcacgactatcggttattgccctttggtgcaggaaggcgtgtttgccccggtgcacaacttgctatcaacttggtcacatctatgttgggtcatttgttgcatcattttacatgggctccggccccgggggttaacccggaggatattgacttggaggagagccctggaacagtaacttacatgaaaaatccaatacaagctattccaactccaagattgcctgcacacttgtatggacgtgtgccagtggatatgtaaaac

SEQ ID NO: 251 - protein, 520 aa, NICOTIANATABACUM
MYSHRSKVSTKIMALSFIFISITLIFLVHKLYHRLRFKLPPGPRPLPVVGNLYDIEPVRFRCFADWAKTYGPIFSVYFGSQLNVVVTTAELAKEVLKENDQNLADRFRTRPANNLSRNGMDLIWADYGPHYVKVRKLCNLELFTPKRLEALRPIREDEVTAMVENIFKDCTKPDNTGKSLLIREYLGSVAFNNITRLTFGKRFMNSKGEIDEQGQEFKGIVSNGIKIGGKLPLAEYVPWLRWFFTMENEALVKHSARRDRLTRMIMDEHTLARKKTGDTKQHFVDALLTLQKQYDLSDDTVIGLLWDMITAGMDTTTITVEWAMAELVKNPRVQLKAQEELDRVIGTDRIMSETDFSKLPYLQCVAKEALRLHPPTPLMLPHRASASVKIGGYDIPKGSIVHVNVWAVARDPAVWKNPLEFRPERFLEEDVDMKGHDYRLLPFGAGRRVCPGAQLAINLVTSMLGHLLHHFTWAPAPGVNPEDIDLEESPGTVTYMKNPIQAIPTPRLPAHLYGRVPVDM

SEQ ID NO: 252 - DNA, 1544 bp, NICOTIANATABACUM
ataatgctctttctactctttgtagcccttcctttcattcttatttttcttcttcctaaattcaaaaatggtggaaataacagattgccaccaggtcctataggtttaccattcattggaaatttgcatcaatatgatagtataactcctcatatctatttttggaaactttccaaaaaatatggcaaaatcttctcattaaaacttgcttctactaatgtggtagtagtttcttcagcaaaattagcaaaagaagtattgaaaaaacaagatttaatattttgtagtagaccatctattcttggccaacaaaaactgtcttattatggtcgtgatattgcttttgcaccttataatgattattggagagaaatgagaaaaatttgtgttcttcatctttttagtttaaaaaaagttcaattatttagtccaattcgtgaagatgaagtttttagaatgattaagaaaatatcaaaacaagcttctacttcacaaattattaatttgagtaatttaatgatttcattaacaagtacaattatttgtagagttgcttttggtgttaggtttgaagaagaagcacatgcaaggaagagatttgattttcttttggccgaggcacaagaaatgatggctagtttctttgtatctgatttttttccctttttaagttagattgacaaattaagtggattgacatatagacttgagaggaatttcaaggatttggataatttttatgaagaactcattgagcaacatcaaaatcctaataagccaaaatatatggaaggagatattgttgatcttttgctacaattgaagaaagagaaattaacaccacttgatctcactatggaagatataaaaggaattctcatgaatgtgttagttgcaggatcagacactagtgcagctgctactgtttgggcaatgacagccttgataaagaatcctaaagccatggaaaaagttcaattagaaatcagaaaatcagttgggaagaaaggcattgtaaatgaagaagatgtccaaaacatcccttattttaaagcagtgataaaggaaatatttagattgtatccaccagctccacttttagttccaagagaatcaatggaaaaaaccatattagaaggttatgaaattcggccaagaaccatagttcatgttaacgcttgggctatagcaagggatcctgaaatatgggaaaatccagatgaatttatacctgagagatttttgaatagcagtatcgattacaagggtcaagattttgagttacttccatttggtgcaggcagaagaggttgcccaggtattgcacttggggttgcatccatggaacttgctttgtcaaatcttctttatgcatttgattgggagttgccttatggagtgaaaaaagaagacatcgacacaaacgttaggcctggaattgccatgcacaagaaaaacgaactttgccttgtcccaaaaaaattatttataaattatattgggacgtggatctcatgctagttctgtgcggtcagctaagctta

SEQ ID NO: 253 - protein, 504 aa, NICOTIANATABACUM
MLFLLFVALPFILIFLLPKFKNGGNNRLPPGPIGLPFIGNLHQYDSITPHIYFWKLSKKYGKIFSLKLASTNVVVVSSAKLAKEVLKKQDLIFCSRPSILGQQKLSYYGRDIAFAPYNDYWREMRKICVLHLFSLKKVQLFSPIREDEVFRMIKKISKQASTSQIINLSNLMISLTSTIICRVAFGVRFEEEAHARKRFDFLLAEAQEMMASFFVSDFFPFLSIDKLSGLTYRLERNFKDLDNFYEELIEQHQNPNKPKYMEGDIVDLLLQLKKEKLTPLDLTMEDIKGILMNVLVAGSDTSAAATVWAMTALIKNPKAMEKVQLEIRKSVGKKGIVNEEDVQNIPYFKAVIKEIFRLYPPAPLLVPRESMEKTILEGYEIRPRTIVHVNAWAIARDPEIWENPDEFIPERFLNSSIDYKGQDFELLPFGAGRRGCPGIALGVASMELALSNLLYAFDWELPYGVKKEDIDTNVRPGIAMHKKNELCLVPKKLFINYIGTWISC

SEQ ID NO: 254 - DNA, 1615 bp, NICOTIANATABACUM
cacattgagtcctctcccaaatcactgattcaccaccaaaagtaccaacaattcaatggaaggtacaaacttgactacatatgcagcagtatttcttgatactctgtttcttttgttcctttccaaacttcttcgccagaggaaactcaatttacctccaggcccaaaaccatggccgatcatcggaaacttaaaccttattggcaatcttcctcatcgctcaatccacgaactctccctcaagtacggacccgttatgcaactccaattcgggtctttccccgttgtagttggatcctccgtcgaaatggctaagattttcctcaaatccatggatattaactttgtaggcaggcctaaaacggctgccggaaaatacacaacgtacaattattccgatattacatggtctccttacggaccatattggcgccaggcacgtaggatgtgcctaacggaattattcagcacgaaacgtctcgattcatacgagtatattcgggctgaggagttgcattctcttctccataatttgaacaaaatatcagggaaaccaattgtgttgaaagattatttgacgacgttgagtttaaatgttattagcaggatggtactggggaaaaggtatttggacgaatccgagaactcgttcgtgaatcctgaggaatttaagaagatgttggacgaattgtttttgctaaatggtgtacttaatattggagattcaattccatggattgatttcatggatttgcaaggttatgttaagaggatgaaagtagtgagcaagaaattcgacaagtttttagagcatgttattgatgagcataacattaggagaaatggagtggagaattatgttgctaaggatatggtggatgttttgttgcagcttgctgatgatccgaagttggaagttaagctggagagacatggagtcaaagcattcactcaggatatgctggctggtggaaccgagagttcagcagtgacagtggagtgggcaatttcagagctgctaaagaagccggagattttcaaaaaggctacagaagaattggatcgagtaattgggcagaatagatgggtacaagaaaaggacattccaaatcttccttacatagaggcaatagtcaaagagactatgcgactgcaccccgtggcaccaatgttggtgccacgtgagtgtcgagaagatattaaggtagcaggctacgacgttcagaaaggaactagggttctcgtgagtgtatggactattggaagagaccctacattgtgggacgagcctgaggtgttcaagccggagagattccatgaaaagtccatagatgttaaaggacatgattatgagcttttgccatttggagcggggagaagaatgtgcccgggttatagcttggggctcaaggtgattcaagctagcttagctaatcttctacatggatttaactggtcattgcctgataatatgactcctgaggacctcaacatggatgagatttttgggctctctacacctaaaaaatttccacttgctactgtgattgagccaagactttcaccaaaactttactctgtttgattcagcagttctatggttccgtcaagatag

SEQ ID NO: 255 - protein, 509 aa, NICOTIANATABACUM
MEGTNLTTYAAVFLDTLFLLFLSKLLRQRKLNLPPGPKPWPIIGNLNLIGNLPHRSIHELSLKYGPVMQLQFGSFPVVVGSSVEMAKIFLKSMDINFVGRPKTAAGKYTTYNYSDITWSPYGPYWRQARRMCLTELFSTKRLDSYEYIRAEELHSLLHNLNKISGKPIVLKDYLTTLSLNVISRMVLGKRYLDESENSFVNPEEFKKMLDELFLLNGVLNIGDSIPWIDFMDLQGYVKRMKVVSKKFDKFLEHVIDEHNIRRNGVENYVAKDMVDVLLQLADDPKLEVKLERHGVKAFTQDMLAGGTESSAVTVEWAISELLKKPEIFKKATEELDRVIGQNRWVQEKDIPNLPYIEAIVKETMRLHPVAPMLVPRECREDIKVAGYDVQKGTRVLVSVWTIGRDPTLWDEPEVFKPERFHEKSIDVKGHDYELLPFGAGRRMCPGYSLGLKVIQASLANLLHGFNWSLPDNMTPEDLNMDEIFGLSTPKKFPLATVIEPRLSPKLYSV

SEQ ID NO: 256 - DNA, 1610 bp, NICOTIANATABACUM; identical to SEQ ID NO: 194

SEQ ID NO: 257 - protein, 503 aa, NICOTIANATABACUM; identical to SEQ ID NO: 195

SEQ ID NO: 258 - DNA, 1611 bp, NICOTIANATABACUM
ctttcatcatatggcatgaaatgggaaatgctcacaacagcaaaattgcagcaatctgtttgataattttcttggtatataaagcatgggaattgttgaagtggatatggattaagccaaagaaactggagagttgcctcagaaaacagggactcaaaggaaattcctacgggctattctatggagatatgaaagaattgtccaaaagtctcaaggaaatcaattcaaagcccatcatcaatctatcaaatgaagtagccccaagaatcattccttattatcttgaaatcatccaaaaatatggtaaaagatgttttgtttggcaaggaccaacccccgcaatattaataacagagccagaattaataaaggagatatttggtaagaactatgtttttcagaagcctaataatcccaacccactgaccaagttattggctcgaggtgttgtaagctacgaggaagaaaaatgggcaaaacacagaaagatcttaaatcctgcctttcatatggagaagttgaagcatatgctaccagcattttacttgagctgtagtgagatgctgaacaaatgggaggagattatcccagtaaaagaatcaaatgagttggacatttggcctcatcttcaaagaatgacaagtgatgtgatttctcgtgctgcctttggtagtagctacgaagaaggaagaagaatatttgaacttcaagaagaacaagctgagtatctaacgaagacattcaattcagtttatatcccaggttccagattttttcccaataaaatgaacaaaagaatgaaagaatgtgaaaaggaagtacgagaaacaattacgtgtctaattgacaacagattaaaggcaaaagaagaaggcaatggcaaggccctcaatgatgacctattgggtatattattagagtcaaattctatagaaattgaagaacatggtaacaagaagtttggaatgagtatacctgaagtaattgaagagtgcaaattattctattttgctggccaagagactacatcagtattgcttgtgtggacactgattttgttagggagaaatccagaatggcaggaacgtgctagagaggaagtttttcaagcctttggaagtgataaaccaacttttgacgaattatatcgcttgaaaattgtgacgatgattttgtacgagtctttaaggttatatccaccaatagcaactcgtactcgaaggactaatgaagaaacaaaattaggggaactagatttaccaaagggtgcactgctctttataccaacaatcttattacatcttgacagggaaatttggggtgaagatgcagatgagttcaatccggagagatttagcgaaggggtggcaaaggcaacaaaggggaaaatgacatattttccatttggtgcaggaccgcgaaaatgcattgggcaaaacttcgcgattttggaagcaaaaatggctatagctatgattctacaacgcttctccttcgagctctctccatcttatacacactctccatacactgtggtcactttgaaacccaaatatggtgctcccctaataatgcacaggctgtagtcctgtgagaatatgctatccgagg

SEQ ID NO: 259 - protein, 521 aa, NICOTIANATABACUM
MGNAHNSKIAAICLIIFLVYKAWELLKWIWIKPKKLESCLRKQGLKGNSYGLFYGDMKELSKSLKEINSKPIINLSNEVAPRIIPYYLEIIQKYGKRCFVWQGPTPAILITEPELIKEIFGKNYVFQKPNNPNPLTKLLARGVVSYEEEKWAKHRKILNPAFHMEKLKHMLPAFYLSCSEMLNKWEEIIPVKESNELDIWPHLQRMTSDVISRAAFGSSYEEGRRIFELQEEQAEYLTKTFNSVYIPGSRFFPNKMNKRMKECEKEVRETITCLIDNRLKAKEEGNGKALNDDLLGILLESNSIEIEEHGNKKFGMSIPEVIEECKLFYFAGQETTSVLLVWTLILLGRNPEWQERAREEVFQAFGSDKPTFDELYRLKIVTMILYESLRLYPPIATRTRRTNEETKLGELDLPKGALLFIPTILLHLDREIWGEDADEFNPERFSEGVAKATKGKMTYFPFGAGPRKCIGQNFAILEAKMAIAMILQRFSFELSPSYTHSPYTVVTLKPKYGAPLIMHRL

SEQ ID NO: 260 - DNA, 1570 bp, NICOTIANATABACUM
ctcattatccatcacctaaaatggagaattcttgggtttttctagccttggcagggctatctgcattagcttttctctgtaaaataatcacctgtcgaagaccggttaaccggaaaataccaccaggtccaaaaccatggcccatcattggcaatttgaacctacttggtcctataccacatcaatcttttgacttgctttccaaaaaatatggagagttgatgctgctgaaatttggctccaggccagttcttgttgcttcatctgctgaaatggcaaaacagtttttaaaagtacatgatgctaatttcgcctcccgtcctatgctagctggtggaaagtatacaagctataactattgtgacatgacatgggcaccctatggtccctattggcgccaagcacgacgaatttaccttaaccagatatttactccgaaaaggctagactcgttcgagtacattcgtgttgaagaaaggcaggccttgatttcccagctgaattcccttgctggaaagccattttttctcaaagaccatttgtcgcgatttagcctctgcagcatgacaaggatggttttgagcaacaagtattttggtgaatcaacagttagagtagaagatttgcagtacctggtagatcaatggttcttacttaatggtgctttcaacattggagattggattccatggctcagcttcttggacctacaaggctatgtgaaacaaatgaaggctttgaaaagaacttttgataagttccacaacattgtgctagatgatcacagggctaagaagaatgcagagaagaactttgtcccaaaagacatggttgatgtcttgttgaagatggctgaagatcctaatctggaagtcaaactcactaatgactgtgtcaaagggttaatgcaggatttactaactggaggaacagatagcttaacagcagcagtgcaatgggcatttcaagaacttcttagacagccaagggttattgagaaggcaaccgaagagcttgaccggattgtcgggaaagagagatgggtagaagagaaagattgctcgcagctatcttacgttgaagcaatcctcaaggaaacactaaggttacatcctctaggaactatgctagcaccgcattgtgctatagaagattgtaacgtggctggttatgacatacagaaaggaacgacctttctggtgaatgtttggaccattggaagggacccaaaatactgggatagagcacaagagtttctccccgagagatttttagagaacgacattgatatggacggacataactttgctttcttgccatttggctcggggcgaaggaggtgccctggctatagccttggacttaaggttatccgagtaacattagccaacatgttgcatggattcaactggaaattacctgaaggtatgaagccagaagatataagtgtggaagaacattatgggctcactacacatcctaagtttcctgttcctgtgatcttggaatctagactttcttcagatctctattcccccatcacttaatcctaagtgcttcctattatagc

SEQ ID NO: 261 - protein, 508 aa, NICOTIANATABACUM
MENSWVFLALAGLSALAFLCKIITCRRPVNRKIPPGPKPWPIIGNLNLLGPIPHQSFDLLSKKYGELMLLKFGSRPVLVASSAEMAKQFLKVHDANFASRPMLAGGKYTSYNYCDMTWAPYGPYWRQARRIYLNQIFTPKRLDSFEYIRVEERQALISQLNSLAGKPFFLKDHLSRFSLCSMTRMVLSNKYFGESTVRVEDLQYLVDQWFLLNGAFNIGDWIPWLSFLDLQGYVKQMKALKRTFDKFHNIVLDDHRAKKNAEKNFVPKDMVDVLLKMAEDPNLEVKLTNDCVKGLMQDLLTGGTDSLTAAVQWAFQELLRQPRVIEKATEELDRIVGKERWVEEKDCSQLSYVEAILKETLRLHPLGTMLAPHCAIEDCNVAGYDIQKGTTFLVNVWTIGRDPKYWDRAQEFLPERFLENDIDMDGHNFAFLPFGSGRRRCPGYSLGLKVIRVTLANMLHGFNWKLPEGMKPEDISVEEHYGLTTHPKFPVPVILESRLSSDLYSPIT

SEQ ID NO: 262 - DNA, 1617 bp, NICOTIANATABACUM
cacattgagtcctctcccaaatcactgattcaccaccaaaagtaccaacaattcaatggaaggtacaaacttgactacatatgcagcagtatttcttgatactctgtttcttttgttcctttccaaacttcttcgccagaggaaactcaatttacctccaggcccaaaaccatggccgatcatcggaaacttaaaccttattggcaatcttcctcatcgctcaatccacgaactctccctcaagtacggacccgttatgcaactccaattcgggtctttccccgttgtagttggatcctccgtcgaaatggctaagattttcctcaaatccatggatattaactttgtaggcaggcctaaaacggctgccggaaaatacacaacgtacaattattccgatattacatggtctccttacggaccatattggcgccaggcacgtaggatgtgcctaacggaattattcagcacgaaacgtctcgattcatacgagtatattcgggctgaggagttgcattctcttctccataatttgaacaaaatatcagggaaaccaattgtgttgaaagattatttgacgacgttgagtttaaatgttattagcaggatggtactggggaaaaggtatttggacgaatccgagaactcgttcgtgaatcctgaggaatttaagaagatgttggacgaattgtttttgctaaatggtgtacttaatattggagattcaattccatggattgatttcatggatttgcaaggttatgttaagaggatgaaagtagtgagcaagaaattcgacaagtttttagagcatgttattgatgagcataacattaggagaaatggagtggagaattatgttgctaaggatatggtggatgttttgttgcagcttgctgatgatccgaagttggaagttaagctggagagacatggagtcaaagcattcactcaggatatgctggctggtggaaccgagagttcagcagtgacagtggagtgggcaatttcagagctgctaaagaagccggagattttcaaaaaggctacagaagaattggatcgagtaattgggcagaatagatgggtacaagaaaaggacattccaaatcatccttacatagaggcaatagtcaaagagactatgcgactgcaccccgtggcaccaatgttggtgccacgtgagtgtcgagaagatattaaggtagcaggctacgacgttcagaaaggaactagggttctcgtgagtgtatggactattggaagagaccctacattgtgggacgagcctgaggtgttcaagccggagagattccatgaaaagtccatagatgttaaaggacatgattatgagcttttgccatttggagcggggagaagaatgtgcccgggttatagcttggggctcaaggtgattcaagctagcttagctaatcttctacatggatttaactggtcattgcctgataatatgactcctgaggacctcaacatggatgagatttttgggctctctacacctaaaaaatttccacttgctactgtgattgagccaagactttcaccaaaactttactctgtttgattcagcagttctatggatccgtcaagatagac

SEQ ID NO: 263 - protein, 509 aa, NICOTIANATABACUM
MEGTNLTTYAAVFLDTLFLLFLSKLLRQRKLNLPPGPKPWPIIGNLNLIGNLPHRSIHELSLKYGPVMQLQFGSFPVVVGSSVEMAKIFLKSMDINFVGRPKTAAGKYTTYNYSDITWSPYGPYWRQARRMCLTELFSTKRLDSYEYIRAEELHSLLHNLNKISGKPIVLKDYLTTLSLNVISRMVLGKRYLDESENSFVNPEEFKKMLDELFLLNGVLNIGDSIPWIDFMDLQGYVKRMKVVSKKFDKFLEHVIDEHNIRRNGVENYVAKDMVDVLLQLADDPKLEVKLERHGVKAFTQDMLAGGTESSAVTVEWAISELLKKPEIFKKATEELDRVIGQNRWVQEKDIPNHPYIEAIVKETMRLHPVAPMLVPRECREDIKVAGYDVQKGTRVLVSVWTIGRDPTLWDEPEVFKPERFHEKSIDVKGHDYELLPFGAGRRMCPGYSLGLKVIQASLANLLHGFNWSLPDNMTPEDLNMDEIFGLSTPKKFPLATVIEPRLSPKLYSV

SEQ ID NO: 264 - DNA, 1657 bp, NICOTIANATABACUM
tgcaatatagttttcctagtcagttctagcctccttttccttagaaataatggattatcatatttctttccattttcaagctcttttagggcttttagcctttgtgttcttgtctattatcttatggagaagaacactcacttcaagaaaattagcccctgaaatcccaggggcatggcctattataggccatcttcgtcagctgagtggtactgataagaatatcccatttccccgaatattgggcgctttggcagataaatatggacctgtcttcacactgagaatagggatgtacccctatttgattgtcaacaattgggaagcagctaaggattgtctcacaacgcatgataaggacttcgctgcccgaccaacttctatggctggtgaaagcatcgggtacaagtatgcgaggtttacttatgctaattttggtccttattataaccaagtgcgcaaactagccctacaacatgtactctcgagtactaaactcgagaaaatgaaacacatacgtgtttctgaattggaaactagcatcaaagaattatattctttgacgctgggcaaaaacaacatgcaaaaagtgaatataagtaaatggtttgaacaattgactttaaacataatcgtgaagacaatttgtggcaagagatatagcaacatagaggaggatgaagaggcacaacgtttcagaaaggcatttaagggcatcatgtttgttgtagggcaaattgttttatatgacgcaattccattcccattgttcaaatactttgatttccaaggtcatatacaattgatgaacaaaatttataaagacttagattctattcttcaaggatggttggatgatcatatgatgaacaaggatgtaaacaataaggatcaagatgccatagatgccatgcttaaggtaacacaacttaatgaattcaaagcctatggtttttctcaggccactgtgatcaagtcgacagtcttgagtttgatcttagatggaaatgacacaaccgctgttcatttgatatgggtaatgtccttattactgaacaatccacatgttatgaaacaaggccaagaagagatagacatgaaagtgggtaaagagaggtggattgaagatactgacataaaaaatttagtgtaccttcaggctatcgttaaagagacattgcgcttgtatccacctgttccttttcttttaccacacgaagcagtgcaagattgtaaagtgactggttaccacattcctaaaggtactcgtctatatatcaatgcgtggaaagtacatcgcgattctgaaatttggtcagagcccgaaaagtttatgcccaatagattcttgactagcaaagcaaatatagatgctcgcggtcaaaattttgaatttataccgtttggttctgggagacggtcatgtccagggttaggttttgcgactttagtgacacatctgacttttggtcgcttgcttcaaggttttgattttagtaagccatcaaacacgccaattgacatgacagaaggcgtaggcgttactttgcctaaggttaatcaagttgaagttctaattacccctcgtttaccttctaagctttatttattttgaaagtgcaaatcatcaatcatgggttgagtaattagtgatact

SEQ ID NO: 265 - protein, 521 aa, NICOTIANATABACUM
MDYHISFHFQALLGLLAFVFLSIILWRRTLTSRKLAPEIPGAWPIIGHLRQLSGTDKNIPFPRILGALADKYGPVFTLRIGMYPYLIVNNWEAAKDCLTTHDKDFAARPTSMAGESIGYKYARFTYANFGPYYNQVRKLALQHVLSSTKLEKMKHIRVSELETSIKELYSLTLGKNNMQKVNISKWFEQLTLNIIVKTICGKRYSNIEEDEEAQRFRKAFKGIMFVVGQIVLYDAIPFPLFKYFDFQGHIQLMNKIYKDLDSILQGWLDDHMMNKDVNNKDQDAIDAMLKVTQLNEFKAYGFSQATVIKSTVLSLILDGNDTTAVHLIWVMSLLLNNPHVMKQGQEEIDMKVGKERWIEDTDIKNLVYLQAIVKETLRLYPPVPFLLPHEAVQDCKVTGYHIPKGTRLYINAWKVHRDSEIWSEPEKFMPNRFLTSKANIDARGQNFEFIPFGSGRRSCPGLGFATLVTHLTFGRLLQGFDFSKPSNTPIDMTEGVGVTLPKVNQVEVLITPRLPSKLYLF

SEQ ID NO: 266 - DNA, 1620 bp, NICOTIANATABACUM
agagagtgaaaatggacgcactacttcaaatgacagtaacagcatcttgtgctgccatagtaattactctgctggtgtgtatatggagagtgctgaactggatttggttcagaccaaagaaattggagttgttgttgagaaaacaaggtttggaaggaaattcttacaaggttttgtatggggacatgaaagagttttctgggatgattaaggaagcatactcaaagcctatgagtctatctgatgatgtagcaccaagactgatgcctttctttcttgaaaccatcaaaaaatatggaaaaagatcctttatatggtttggtccaagaccactagtattgattatggatcctgagcttataaaggaagtactctcaaaaatccatctgtatcaaaagcctggtggaaatccattagcaacactattggtacaaggaatagcaacctatgaggaagacaaatgggccaaacatagaaaaatcatcaatcccgctttccatctagagaagctaaagcttatgcttccagcatttcgcttaagctgtagtgagatgctgagcaaatgggaagacattgtttcagctgatagctcacatgagatagatgtatggtctcaccttgagcaattgacttgcgatgtgatctctcggacagcttttggcagtagttatgaagaaggtagaaagatttttgaacttcaaaaggaacaagctcagtatcttgtggaagttttccgctccgtttatatcccaggaaggagatttttgccaacaaagaggaatagaagaatgaaggaaataaaaaaggatgtccgggcatcaattaaaggtattattgataaaagattgaaggcaatgaaagcaggggacaccaataatgaggatctattgggtatattactggaatcgaatattaaagaaattgaacagcacggaaacaaggattttggaatgagcattgaagaagtcattgaagaatgcaagttattctattttgctggccaagaaactacatcagtgttactcctatggtctctagtgttgttgagcaggtatcaagattggcaggcacgggccagagaagaaatcttgcaagtctttggcagtcgaaaaccagattttgacggattaaatcatctaaaaattgtgacaatgatcttgtacgagtctttaaggctgtatccctcactaataacacttacccgccggtgtaatgaagacattgtattaggagaactatctctaccagctggtgttctagtctctttgccattgattttgttgcatcatgatgaagagatatggggtgaagatgcaaaggagttcaaaccagagagatttagagaaggaatatcaagtgcaacaaagggtcaactcacatattttccatttagctggggtcctagaatatgtattggacaaaattttgccatgttagaagcaaagatggctctgtctatgatcctgcaacgcttctcttttgaactgtctccgtcttatgcacatgcccctcggtccataataaccgttcagcctcagtatggtgctccacttattttccacaaactataattttggtacttctactaatattttagggtttattcagactcaaaaaaaa

SEQ ID NO: 267 - protein, 513 aa, NICOTIANATABACUM
MTVTASCAAIVITLLVCIWRVLNWIWFRPKKLELLLRKQGLEGNSYKVLYGDMKEFSGMIKEAYSKPMSLSDDVAPRLMPFFLETIKKYGKRSFIWFGPRPLVLIMDPELIKEVLSKIHLYQKPGGNPLATLLVQGIATYEEDKWAKHRKIINPAFHLEKLKLMLPAFRLSCSEMLSKWEDIVSADSSHEIDVWSHLEQLTCDVISRTAFGSSYEEGRKIFELQKEQAQYLVEVFRSVYIPGRRFLPTKRNRRMKEIKKDVRASIKGIIDKRLKAMKAGDTNNEDLLGILLESNIKEIEQHGNKDFGMSIEEVIEECKLFYFAGQETTSVLLLWSLVLLSRYQDWQARAREEILQVFGSRKPDFDGLNHLKIVTMILYESLRLYPSLITLTRRCNEDIVLGELSLPAGVLVSLPLILLHHDEEIWGEDAKEFKPERFREGISSATKGQLTYFPFSWGPRICIGQNFAMLEAKMALSMILQRFSFELSPSYAHAPRSIITVQPQYGAPLIFHKL

SEQ ID NO: 268 - DNA, 1671 bp, NICOTIANATABACUM
tgcaatatagttttcctagtcagttctagcctccttttccttagaaataatggattatcatatttctttccattttcaagctcttttagggcttttagcctttgtgttcttgtctattatcttatggagaagaacactcacttcaagaaaattagcccctgaaatcccaggggcatggcctattataggccatcttcgtcagctgagtggtactgataagaatatcccatttccccgaatattgggcgctttggcagataaatatggacctgtcttcacactgagaatagggatgtacccctatttgattgtcaacaattgggaagcagctaaggattgtctcacaacgcatgataaggacttggctgcccgaccaacttctatggctggtgaaagcatcgggtacaagtatgcgaggtttacttatgctaattttggtccttattataaccaagtgcgcaaactagccctacaacatgtactctcgagtactaaactcgagaaaatgaaacacatacgtgtttctgaattggaaactagcatcaaagaattatattctttgacgctgggcaaaaacaacatgcaaaaagtgaatataagtaaatggtttgaacaattgactttaaacataatcgtgaagacaatttgtggcaagagatatagcaacatagaggaggatgaagaggcacaacgtttcagaaaggcatttaagggcatcatgtttgttgtagggcaaattgttttatatgacgcaattccattcccattgttcaaatactttgatttccaaggtcatatacaattgatgaacaaaatttataaagacttagattctattcttcaaggatggttggatgatcatatgatgaacaaggatgtaaacaataaggatcaagatgccatagatgccatgcttaaggtaacacaacttaatgaattcaaagcctatggtttttctcaggccactgtgatcaagtcgacagtcttgagtttgatcttagatggaaatgacacaaccgctgttcatttgatatgggtaatgtccttattactgaacaatccacatgttatgaaacaaggccaagaagagatagacatgaaagtgggtaaagagaggtggattgaagatactgacataaaaaatttagtgtaccttcaggctatcgttaaagagacattgcgcttgtatccacctgttccttttcttttaccacacgaagcagtgcaagattgtaaagtgactggttaccacattcctaaaggtactcgtctatatatcaatgcgtggaaagtacatcgcgatcctgaaatttggtcagagcccgaaaagtttatgcccaatagattcttgactagcaaagcaaatatagatgctcgcggtcaaaattttgaatttataccgtttggttctgggagacggtcatgtccagggataggttttgcgactttagtgacacatctgacttttggtcgcttgcttcaaggttttgattttagtaagccatcaaacacgccaattgacatgacagaaggcgtaggcgttactttgcctaaggttaatcaagttgaagttctaattacccctcgtttaccttctaagctttatttattttgaaggtgcaaatcatcaatcatggcttgagtaattagttatactttaatatgtttctc

SEQ ID NO: 269 - protein, 521 aa, NICOTIANATABACUM
MDYHISFHFQALLGLLAFVFLSIILWRRTLTSRKLAPEIPGAWPIIGHLRQLSGTDKNIPFPRILGALADKYGPVFTLRIGMYPYLIVNNWEAAKDCLTTHDKDLAARPTSMAGESIGYKYARFTYANFGPYYNQVRKLALQHVLSSTKLEKMKHIRVSELETSIKELYSLTLGKNNMQKVNISKWFEQLTLNIIVKTICGKRYSNIEEDEEAQRFRKAFKGIMFVVGQIVLYDAIPFPLFKYFDFQGHIQLMNKIYKDLDSILQGWLDDHMMNKDVNNKDQDAIDAMLKVTQLNEFKAYGFSQATVIKSTVLSLILDGNDTTAVHLIWVMSLLLNNPHVMKQGQEEIDMKVGKERWIEDTDIKNLVYLQAIVKETLRLYPPVPFLLPHEAVQDCKVTGYHIPKGTRLYINAWKVHRDPEIWSEPEKFMPNRFLTSKANIDARGQNFEFIPFGSGRRSCPGIGFATLVTHLTFGRLLQGFDFSKPSNTPIDMTEGVGVTLPKVNQVEVLITPRLPSKLYLF

SEQ ID NO: 270 - DNA, 1618 bp, NICOTIANATABACUM
tttgattcaaccatggagaaccaatactcctactcattctcttcctacttctacttagctatagtactgtttcttcttccaattttggtcaaatatttcttccatcggagaagaaatttacctccaagtccattttctcttccaataattggtcacctttaccttctcaagaaaactctccatctcactctaacatccttatcagctaaatatggtcctgttttatacctcaaattgggctctatgcctgtgattgttgtgtcctcaccatctgctgttgaagaatgtttaaccaagaatgatatcatattcgcaaataggcccaagaccgtggctggtgacaagtttacctacaattatactgtttatgtttgggcaccctatggccaactttggagaattcttcgccgattaactgtcgttgaactcttctcttcacatagcctacagaaaacttctatccttagagatcaagaagttgcaatatttatccgttcgttatacaaattctcaaaggatagtagcaaaaaagtcgatttgaccaactggtcttttactttggttttcaatcttatgaccaaaattattgctgggagacatattgtgaaggaggaagatgctggcaaggaaaagggcattgaaattattgaaaaacttagagggactttcttagtaactacatcattcttgaatatgtgtgatttcttgccagtattcaggtgggttggttacaaagggcaggagaagaagatggcctcaattcacaatagaagaaatgaattcttgaacagcttgcttgatgaatttcgacacaagaaaagtagtgcttcacaatctaacacaactgttggaaacatggagaagaaaaccacactgattgaaaagctcttgtctcttcaagaatcagagcctgaattctacactgatgatatcatcaaaagtattatgctggtagtttttgttgcaggaacagagacctcatcaacaaccatccaatgggtaatgaggcttcttgtagctcaccctgaggcattgtataagctacgagctgacattgacagtaaagttgggaataagcgcttgctgaatgaatcagacctcaacaagcttccgtatttgcattgtgttgttaatgagacaatgagattatacactccgataccacttttattgcctcattattcaactaaagattgtattgtggaaggatatgatgtaccaaaacatacaatgttgtttgtcaacgcttgggccattcacagggatcccaaggtatgggaggagcctgacaagttcaagccagagagatttgaggcaacagaaggggaaacagaaaggttcaattacaagcttgtaccatttggaatggggagaagagcgtgccctggagctgatatggggttgcgagcagtttctttggcattaggtgcacttattcaatgctttgactggcaaattgaggaagcggaaagcttggaggaaagctataattctagaatgactatgcagaacaagcctttgaaggttgtctgcactccacgcgaagatcttggccagcttctatcccaactctaaggcaatttatcaatgccaaacgtaatcttcatctaccactatg

SEQ ID NO: 271 - protein, 520 aa, NICOTIANATABACUM
MENQYSYSFSSYFYLAIVLFLLPILVKYFFHRRRNLPPSPFSLPIIGHLYLLKKTLHLTLTSLSAKYGPVLYLKLGSMPVIVVSSPSAVEECLTKNDIIFANRPKTVAGDKFTYNYTVYVWAPYGQLWRILRRLTVVELFSSHSLQKTSILRDQEVAIFIRSLYKFSKDSSKKVDLTNWSFTLVFNLMTKIIAGRHIVKEEDAGKEKGIEIIEKLRGTFLVTTSFLNMCDFLPVFRWVGYKGQEKKMASIHNRRNEFLNSLLDEFRHKKSSASQSNTTVGNMEKKTTLIEKLLSLQESEPEFYTDDIIKSIMLVVFVAGTETSSTTIQWVMRLLVAHPEALYKLRADIDSKVGNKRLLNESDLNKLPYLHCVVNETMRLYTPIPLLLPHYSTKDCIVEGYDVPKHTMLFVNAWAIHRDPKVWEEPDKFKPERFEATEGETERFNYKLVPFGMGRRACPGADMGLRAVSLALGALIQCFDWQIEEAESLEESYNSRMTMQNKPLKVVCTPREDLGQLLSQL

SEQ ID NO: 272 - DNA, 1676 bp, NICOTIANATABACUM
cctttttaagatgtatttaagatttaagatttaagatgaagcaactgaggtaagtcctttcaaggagtagttgtcacttctgagaatggagatgatgtacagcataatagcagcagccagtattgcaattatcttggtatatacatggaaagtgttgaattgggcttggtttgggccgaagaaaatggagaaatgcttaagacagaggggtctcaagggaaatccttataagctactctatggagatctaaacgaactgacaaaaagcataatagaagccaagtctaagcccatcaatttctctgatgatattgctcaaaggctcatccctttttttcttgacgccatcaacaaaaatggtaaaaactccttcgtctggcttggaccgtatccaatagtgttgatcacggatcctgagcatttaaaggagattttcacaaagaattatgtgtatcaaaagcaaactcatcccaatccatacgccaagctattagctcacggtcttgtcagccttgaggaagacaaatgggccaaacacagaaaaatcattagtcctgccttccatgtcgagaagctaaagcatatgctgcctgcattttatctgagttgtagtgaaatgataagcaaatgggaggaggttgttccaaaagaaacatcattcgagctcgatgtatggccagaccttcaaataatgaccagtgaagtcatttctcgcactgcatttgggagtagctatgaagaaggaagaatagtatttgaacttcagaaagaacaagctgagtatgtaatggacataggacgttcaatttatataccaggatcaaggttcttgcctactaaaaggaacaaaagaatgctggaaattgaaaagcaagtgcaaacaacaattaggcgtatcatcgacaaaagattgaaggcaatggaagaaggggagactagtaaagatgacttattaggcatattacttgaatccaatttgaaagaaattgaacttcatggaagaaatgacttgggaataacaacgtcagaagtgattgaagagtgcaagttattctattttgccggccaagagaccacttcagtgttgcttgtttggacaatgattttgttgtgcttacatccagagtggcaagtacgtgccagaaaggaagtgttgcagatctttggaaatgataaaccagatttggaaggactaagtcgcttgaaaattgtaacaatgatcttgtacgagacgttacgcctattccccccattaccagcatttggtagaaggaacaaagaagaagtcaaattaggggagctacatctaccggctggagtgttactcgttataccagcaatcttagtacattatgataaggaaatatggggtgaagatgcaaaggaattcaaaccagaaagattcagtgaaggagtgtcaaaggcaacaaatggacaagtctcatttataccatttagctggggacctcgtgtttgcattggacaaaacttcgcaatgatggaagcaaaaatggcagtaactatgatactacaaaaattctcctttgaactatccccttcttatacacatgctccatttgcaattgtgactattcatccccagtatggtgctcctctgcttatgcgcagactttaaaacatatgttgctgatatttaagatcagtggcgttttatt

SEQ ID NO: 273 - protein, 2118 aa, NICOTIANATABACUM
MEMMYSIIAAASIAIILVYTWKVLNWAWFGPKKMEKCLRQRGLKGNPYKLLYGDLNELTKSIIEAKSKPINFSDDIAQRLIPFFLDAINKNGKNSFVWLGPYPIVLITDPEHLKEIFTKNYVYQKQTHPNPYAKLLAHGLVSLEEDKWAKHRKIISPAFHVEKLKHMLPAFYLSCSEMISKWEEVVPKETSFELDVWPDLQIMTSEVISRTAFGSSYEEGRIVFELQKEQAEYVMDIGRSIYIPGSRFLPTKRNKRMLEIEKQVQTTIRRIIDKRLKAMEEGETSKDDLLGILLESNLKEIELHGRNDLGITTSEVIEECKLFYFAGQETTSVLLVWTMILLCLHPEWQVRARKEVLQIFGNDKPDLEGLSRLKIVTMILYETLRLFPPLPAFGRRNKEEVKLGELHLPAGVLLVIPAILVHYDKEIWGEDAKEFKPERFSEGVSKATNGQVSFIPFSWGPRVCIGQNFAMMEAKMAVTMILQKFSFELSPSYTHAPFAIVTIHPQYGAPLLMRRLSEQIDDBADNANICTIANATABACMCTAAATTTCATATACCTTTAGTACTCTTGAAATTTTCAAATAATGGTTTATCTTCTTTCTCCCATAGAAGCCATTGTAGGATTTGTAACCTTTTCATTTCTATTCTACTTTCTATGGACCAAAAAACAATCAAAAATCTTAAACCCACTACCTCCAAAAATCCCAGGTGGATGGCCAGTAATCGGCCATCTCTTTTATTTCAAGAACAATGGCGATGAAGATCGCCATTTTTCTCAAAAACTCGGTGACTTAGCTGACAAATATGGTCCCGTCTTCACTTTCCGGTTAGGGTTTCGCCGTTTCTTGGCGGTGAGTAGTTATGAAGCTATGAAAGAATGCTTCACTACCAATGATATCCATTTCGCCGATCGGCCATCTTTACTCTACGGAGAATACCTTTGCTATAATAATGCCATGCTTGCTGTTGCCAAATATGGCCCTTACTGGAAAAAAAATCGAAAGTTAGTCAATCAAGAAGTTCTCTCCGTTAGTCGGCTCGAAAAATTCAAACATGTTAGATTTTCTATAATTCAGAAAAATATTAAACAATTGTATAATTGTGATTCACCAATGGTGAAGATAAACCTTAGTGATTGGATAGATAAATTGACATTCGACATCATTTTGAAAATGGTTGTTGGGAAGAACTATAATAATGGACATGGAGAAATACTCAAAGTTGCTTTTCAGAAATTCATGGTTCAAGCTATGGAGATGGAGCTCTATGATGTTTTTCACATTCCATTTTTCAAGTGGTTGGATCTTACAGGGAATATTAAGGCTATGAAACAAACTTTCAAAGACATTGATAATATTATCCAAGGTTGGTTAGATGAGCACATTAAGAAGAGAGAAACAAAGGATGTTGGAGGTGAAAACGAACAAGATTTTATAGATGTGGTGCTTTCCAAGATGAGCGACGAACATCTTGGCGAGGGTTACTCTCATGACACAACCATCAAAGCAACTGTATTCACTTTGGTCTTGGATGCAACAGACACACTTGCACTTCATATAAAGTGGGTAATGGCGTTAATGATAAACAATAAGCATGTCATGAAGAAAGCACAAGAAGAGATGGACACAATTGTTGGTAGAGATAGATGGGTAGAAGAGAGTGATATCAAGAATTTGGTGTATCTCCAAGCAATTGTTAAAGAAGTATTACGATTACATCCACCTGCACCTTTGTCAGTGCAACACCTATCTGTGGAAGATTGTGTTGTCAATGGGTACCATATTCCTAAGGGGACTGCACTACTTACCAATATTATGAAACTACAGCGAGATCCTCAAACATGGCCAAATCCTGATAAATTCGATCCAGAGAGATTCCTGACGACTCATGCTACTATTGACTACCGCGGGCAGCACTATGAGTTGATCCCCTTTGGTACGGGGAGACGAGCTTGTCCCGCGATGAATTATTCATTGCAAGTGGAACACCTTTCAATTGCTCATATGATCCAAGGTTTCAGTTTTGCAACTACGACCAATGAGCCTTTGGATATGAAACAAGGTGTGGGTTTAACTTTACCAAAGAAGACTGATGTTGAAGTTCTAATTACCCCTCGTTT

SEQ ID NO: 274 - protein, 511 aa, NICOTIANATABACUM
MVYLLSPIEAIVGFVTFSFLFYFLWTKKQSKILNPLPPKIPGGWPVIGHLFYFKNNGDEDRHFSQKLGDLADKYGPVFTFRLGFRRFLAVSSYEAMKECFTTNDIHFADRPSLLYGEYLCYNNAMLAVAKYGPYWKKNRKLVNQEVLSVSRLEKFKHVRFSIIQKNIKQLYNCDSPMVKINLSDWIDKLTFDIILKMVVGKNYNNGHGEILKVAFQKFMVQAMEMELYDVFHIPFFKWLDLTGNIKAMKQTFKDIDNIIQGWLDEHIKKRETKDVGGENEQDFIDVVLSKMSDEHLGEGYSHDTTIKATVFTLVLDATDTLALHIKWVMALMINNKHVMKKAQEEMDTIVGRDRWVEESDIKNLVYLQAIVKEVLRLHPPAPLSVQHLSVEDCVVNGYHIPKGTALLTNIMKLQRDPQTWPNPDKFDPERFLTTHATIDYRGQHYELIPFGTGRRACPAMNYSLQVEHLSIAHMIQGFSFATTTNEPLDMKQGVGLTLPKKTDVEVLITPR

SEQ ID NO: 275 - DNA, 1434 bp, NICOTIANATABACUM
  misc_feature (564)..(564): n is a, c, g, or t
ctttttctccccaaaaaagagctcatttcccttgtccccaaaaatggatcttctcttactagagaagaccttaattggtctcttctttgccattttaatcgctgtaattgtctctagacttcgttcaaagcgttttaagcttcccccaggaccaatcccagtaccagtttttggtaattggcttcaagttggtgatgatttaaaccacagaaatcttactgattttgccaaaaaatttggtgatcttttcttgttaagaatgggccagcgtaatttagttgttgtgtcatctcctgaattagctaaagaagttttacacacacaaggtgttgaatttggttcaagaacaagaaatgttgtatttgatatttttactggaaaaggtcaagatatggtttttactgtatatggtgaacactggagaaaaatgaggagaattatgactgtaccattttttactaataaagttgtgcagcaatatagaggggggtgggagtttgaagtggcaagtgtaattgaggatgtgaagaaaaatcctgaatctgctactaatgggattgtatnaaggaggagattacaattgatgatgtataataatatgtttaggattatgtttgataggagatttgagagtgaagatgatcctttgtttgttaagcttaaggctttgaatggtgaaaggagtagattggctcagagttttgagtataattatggtgattttattcccattttgaggccttttttgagaggttatttgaagatctgtaaagaagttaaggagaagaggctgcagcttttcaaagattactttgttgatgaaagaaagaagctttcaaataccaagagcttggacagcaatgctctgaaatgtgcgattgatcacattcttgaggctcaacagaagggggagatcaatgaggacaacgttctttacattgttgaaaacatcaatgttgctgctatagaaaccacattatggtcaattgagtggggtatcgccgagttagtcaaccaccctcacatccaaaagaaactccgcgacgagattgacacagttcttggcccaggagtgcaagtgactgaaccagacacccacaagcttccataccttcaggctgtgatcaaggagacgcttcgtctccgtatggcaattcctctattagtcccacacatgaaccttcacgatgcaaagcttggcgggtttgatattccagcagagagcaaaatcttggttaacgcttggtggctagctaacaacccggctcattggaagaaacccgaagagttcagacccgagaggttcttcgaagaggagaagcacgttgaggccaatggcaatgacttcagatatcttccgtttggcgttggtaggaggagttgccctggaactatacttgcattgccaattcttggcattactttgggacgttt

SEQ ID NO: 276 - protein, 463 aa, NICOTIANATABACUM
MDLLLLEKTLIGLFFAILIAVIVSRLRSKRFKLPPGPIPVPVFGNWLQVGDDLNHRNLTDFAKKFGDLFLLRMGQRNLVVVSSPELAKEVLHTQGVEFGSRTRNVVFDIFTGKGQDMVFTVYGEHWRKMRRIMTVPFFTNKVVQQYRGGWEFEVASVIEDVKKNPESATNGIVLRRRLQLMMYNNMFRIMFDRRFESEDDPLFVKLKALNGERSRLAQSFEYNYGDFIPILRPFLRGYLKICKEVKEKRLQLFKDYFVDERKKLSNTKSLDSNALKCAIDHILEAQQKGEINEDNVLYIVENINVAAIETTLWSIEWGIAELVNHPHIQKKLRDEIDTVLGPGVQVTEPDTHKLPYLQAVIKETLRLRMAIPLLVPHMNLHDAKLGGFDIPAESKILVNAWWLANNPAHWKKPEEFRPERFFEEEKHVEANGNDFRYLPFGVGRRSCPGTILALPILGITLGR

SEQ ID NO: 277 - DNA, 1723 bp, NICOTIANATABACUM
ccaaattagagcaagaaattaacaagtctagttaccttctccctttttaagagtatttaagatttaagatttaagatgaagcaactgaggtaagtcctttcaaggagtagttgtcacttctgagaatggagatgatgtacagcataatagcagcagccagtattgcaattatcttggtatatacatggaaagtgttgaattgggcttggtttgggccaaagaaaatggagaaatgcttaagacagaggggtctcaagggaaatccttataagctactctatggagatctaaacgaactgacaaaaagcataatagaagccaagtctaagcccatcaatttctctgatgatattgctcaaaggctcatccctttttttcttgacgccatcaacaaaaatggtaaaaactccttcgtctggcttggaccgtatccaatagtgttgatcacggatcctgagcatttaaaggagattttcacaaagaattatgtgtatcaaaagcaaactcatcccaatccatacgccaagctattagctcacggtcttgtcagccttgaggaagacaaatgggccaaacacagaaaaatcattagtcctgccttccatgtcgagaagctaaagcatatgctgcctgcattttatctgagttgtagtgaaatgataagcaaatgggaggaggttgttccaaaagaaacatcattcgagctcgatgtatggccagaccttcaaataatgaccagtgaagtcatttctcgcactgcatttgggagtagctatgaagaaggaagaatagtatttgaacttcagaaagaacaagctgagtatgtaatggacataggacgttcaatttatataccaggatcaaggttcttgcctactaaaaggaacaaaagaatgctggaaattgaaaagcaagtgcaaacaacaattaggcgtatcatcgacaaaagattgaaggcaatggaagaaggggagactagtaaagatgacttattaggcatattacttgaatccaatttgaaagaaattgaacttcatggaagaaatgacttgggaataacaacatcagaagtgattgaagagtgcaagttaatctattttgccggccaagagaccacttcagtgttgcttgtttggacaatgattttgttgtgcttacatccagagtggcaagtacgtgccagaaaggaagtgttgcagacctttggaaatgataaaccagatttggaaggactaagtcgcttgaaaattgtaacaatgatcttgtacgagacgttacgcctattccccccattaccagcatttggtagaaggaacaaagaagaagtcaaattaggggagctacatctaccggctggagtgttactcgttataccagcaatcttagtacattatgataaggaaatatggggtgaagatgcaaaggaattcaaaccagaaagattcagtgaaggagtgtcaaaggcaacaaatggacaagtctcatttataccatttagctagggacctcgtgtttgcattggacaaaacttcgcaatgatggaagcaaaaatggcagtaactatgatactacaaaaattctcctttgaactatccccttcttatacacatgctccatttgcaattgtgactattcatccccagtatggtgctcctctgcttatgcgcagactttaaaacatatgttgctgatatttaagatcagtggcgttttattctccatg

SEQ ID NO: 278 - protein, 458 aa, NICOTIANATABACUM
MEMMYSIIAAASIAIILVYTWKVLNWAWFGPKKMEKCLRQRGLKGNPYKLLYGDLNELTKSIIEAKSKPINFSDDIAQRLIPFFLDAINKNGKNSFVWLGPYPIVLITDPEHLKEIFTKNYVYQKQTHPNPYAKLLAHGLVSLEEDKWAKHRKIISPAFHVEKLKHMLPAFYLSCSEMISKWEEVVPKETSFELDVWPDLQIMTSEVISRTAFGSSYEEGRIVFELQKEQAEYVMDIGRSIYIPGSRFLPTKRNKRMLEIEKQVQTTIRRIIDKRLKAMEEGETSKDDLLGILLESNLKEIELHGRNDLGITTSEVIEECKLIYFAGQETTSVLLVWTMILLCLHPEWQVRARKEVLQTFGNDKPDLEGLSRLKIVTMILYETLRLFPPLPAFGRRNKEEVKLGELHLPAGVLLVIPAILVHYDKEIWGEDAKEFKPERFSEGVSKATNGQVSFIPFS

SEQ ID NO: 279 - DNA, 1717 bp, NICOTIANATABACUM
tttgcctttgctcgtcattgatgacgacttcattttgttttcttccccacgaaaatggtagatatgatatggagggacgtagggaagaattactgggacaaacctagtgagtgaaaatggaaacagttgaaatgatagtaaaagtatcttgtgctgccatagtaattactctgttggtgtgtctatggagagtgctgaattgggtttggttcagaccaaagaaattagagaagttgttgagaaaacaggttttgtatggggacatgaaagagttttctgggatgattaaggaagcatactcaaagcctatgagtctgtctgatgatgtagcaccacgaatgatgcctttctttcttgaaaccatcaagaaatatggaaaaagatcctttatatggttcggtccaagaccactagtattgatcatggatcctgagcttataaaggaagtactctccaaaatctatctttatcaaaagcccggtggaaatccattagcaacactattggtacaaggattagcaacctatgaggaagacaaatgggccaaacatagaaaaatcatcaatcccgctttccatctagagaagctaaagcatatgcttccagcttttcgcttgagctgtagtgagatgctgagcaaatgggaagacattgtttcagctgaaggctcacatgagatagatgtatggcctaaccttgagcaattgagttgcgatgtgatctctcggacagcttttggcaatagttatgaagaaggtagaaagatttttgaacttcaaaaggaacaaactcagcatcttgtggaagctttccgctctgtttatatcccaggaaggagatttttgccaacaaagaggaatagaagaatgaaggaaataaaaaaggaggttcgagcgtcaattaaaggtattattgataaaagattgaaggcaatgaaagcaggggacaccaataatgaggatctattgggatattgctggaatcaaattttaaagaaattgaacagcgcggaaacaaggattttggaatgagcattgaagatgtcattgaagaatgcaagttattctattttgctggccaagaaactacatcagtgttgctcctatggtctctagtgtcgttgagcaggtatcaagattggcagacacgggccagagaagaagtcttgcatgtctttgggagtcggaaaccagattttgatgaattaaatcatctaaaagttgtgacaatgatcatgtacgagtctttaaggctatatccctcactaataacacttacccgccggtgtaatgaagacattgtattaggagaactatctctaccagctggtgtcctagtctctttgccaatgattttgttgcatcatgatgaagagatatggggtgaagatgcaaaggagttcaaaccagagagatttagagaaggattgtcaagtgcaacaaagggtcaacttacatattttccatttggctggggtcctagaatatgtattggacaaaattttgccatgttagaagcaaagatggctctgtctatgatcctgcaacgcttctcttttgaactgtctccgtcttatgcacatgcccctcagtccatattaaccgttcagcctcaatatggtgctccacttattttccacaagctataatttggtacttgtgaaaggtgtcttgtacaatatgttagtagagtttattcagacttagatacatgcttc

SEQ ID NO: 280 - protein, 304 aa, NICOTIANATABACUM
METVEMIVKVSCAAIVITLLVCLWRVLNWVWFRPKKLEKLLRKQVLYGDMKEFSGMIKEAYSKPMSLSDDVAPRMMPFFLETIKKYGKRSFIWFGPRPLVLIMDPELIKEVLSKIYLYQKPGGNPLATLLVQGLATYEEDKWAKHRKIINPAFHLEKLKHMLPAFRLSCSEMLSKWEDIVSAEGSHEIDVWPNLEQLSCDVISRTAFGNSYEEGRKIFELQKEQTQHLVEAFRSVYIPGRRFLPTKRNRRMKEIKKEVRASIKGIIDKRLKAMKAGDTNNEDLLGYCWNQILKKLNSAETRILE

SEQ ID NO: 281 - DNA, 1559 bp, NICOTIANATABACUM
ccaaaatgcagttcttcaacttcatttcctttgtcttttttgtgtctttcctctttttattaaggaaatggaagaactccaatagccaaaccaaaagattgcctccaggtccatggaaattacctgtacttggaagcatgtttcatttgctaggtggacctccacatcatgtccttggagatttagccaaaaaatatggtccacttatgcaccttcaactaggtgaagtttctgtagtttctgttacttctcctgagatggcaaaagaagtactaaaaactcatgacctcgcttttgcatctaggccgttacttttggcagccaaaattgtctgctataatgggacagacattgtcttttccccctatggcgattattggagacaaacgcgtaaaatttgtctcttggaattgctcagtgccaaaaatgttaggtcattcagctcagtcagacgagatgaagttttccatatgattgaatttttttcgatcatcttctggtaagccagttaatgtatcaaaaaggatttctctattcacaacctctatgacatgtagatcagcctttggacaagaatacaaggagcaagacgaattcgcacaactagtaaaaaaagtgtcaagcttaatggaagggtttgatgttgctgatatattcccttcattgaagtttcttcatgtgctcagtggaatgaaggctaaagttatggatgcacaccatgagttagatgccattcttgaaaaaattatcaatgagcacaagaaaattgcaactggaaagaataataatgaattaggaggtgaaggattaattgacgtactgctaagacttatgaaagagggaggccttcaattcccgatcaccaacgacaacatcaaagctattatttttgacatgtttggtgcgggaacggaaacttcatcaaccacaattgactgggccatggtcgaaatgataaagaatccaagtgtattcgctaaagctcaagcagaggtaagagaagccttcagagagaaagaaacttttgatgaaaatgatgtcgaggagttgaaatacttaaaattggttatcaaagaaactttcagactccatcctccatttccccttttgctcccaagagaatctagagaagaaacagatataaacggctacactattccttttaaaacaaaacttatggttaacgttcgggctattggaagagatccaaaatattgggatgacgtggaaagttttaagccagagagatttgagcacaactctatggattttattggtaataattttgaatatcttccctttggtagtggaaggagaatgtgccctgggatatcatttggtttggctaatgtttatttgccactagctcaattgttatatcattttgattggaaactccctactggaatcaattcaagtgacttggacatgactgagtcgtcaggagtaacttgtgctagaaagagtgatttatacttgactgctactccatatcaactttctcaagagtgatgcaatgatatcaaccttttgaatttcggtcaaccccaccaatagtg

SEQ ID NO: 282 - protein, 165 aa, NICOTIANATABACUM
MQFFNFISFVFFVSFLFLLRKWKNSNSQTKRLPPGPWKLPVLGSMFHLLGGPPHHVLGDLAKKYGPLMHLQLGEVSVVSVTSPEMAKEVLKTHDLAFASRPLLLAAKIVCYNGTDIVFSPYGDYWRQTRKICLLELLSAKNVRSFSSVRRDEVFHMIEFFSIIFW

SEQ ID NO: 283 - DNA, 1592 bp, NICOTIANATABACUM
ccccaccaaaaaatcatttctctcgtctaaaatggatcttctcttactagagaagaccttaattggtcttttctttgccattttaatcgctttaattgtctctaaacttcgttcaaagcgttttaagcttcctccaggaccaattccagtaccagtttttggtaattggcttcaagttggtgatgatttaaaccacagaaatcttactgattatgccaagaaatttggagatcttttcttgttaagaatgggtcaacgtaacttagttgttgtgtcatctcctgaattagctaaagaagttttacacacacaaggtgttgaatttggttcaagaacaagaaatgttgtgtttgatatttttactggaaaaggtcaagatatggtttttactgtatatggtgaacattggagaaaaatgaggagaattatgactgtaccattttttactaataaagttgtgcaacagtatagaggggggtgggagtttgaggtggcaagtgtaattgaggatgtgaaaaaaaatcctgaatctgctactaatgggatcgtattaaggaggagattacaattaatgatgtataataatatgtttaggattatgtttgataggagatttgagagtgaagatgatcctttgtttgttaagcttaaggctttgaatggtgaaaggagtagattggctcaaagttttgagtataattatggtgattttattccaattttgaggcctttttttgagaggttatttgaagatctgtaaagaagttaaggagaagaggctgcagcttttcaaagattactttgttgatgaaagaaagaagctttcgaataccaagagctcggacagcaatgccctaaaatgtgcgattgatcacattcttgaggctcaacagaagggagagatcaatgaggacaacgttctttacattgttgaaaacatcaatgttgctgcaattgaaacaacattatggtcaattgagtggggtatcgccgagctagtcaaccaccctcacatccaaaagaaactgcgcgacgagattgacacagttcttggaccaggagtgcaagtgactgaaccagacacccacaagcttccataccttcaggctgtgatcaaggaggcacttcgtctccgtatggcaattcctctattagtcccacacatgaaccttcacgacgcaaagcttggcgggtttgatattccagcagagagcaaaatcttggttaacgcttggtggttagctaacaacccggctcattggaagaaacccgaagagttcagacccgagaggttctttgaagaggagaagcatgttgagccaatggcaatgacttcagatatcttccgtttggcgttggtaggaggagctgccctggaattatacttgcattgccaactcttggcatcactttgggacgtttggttcagaatgttgcctcctccaggccagtcgaagctcgacaccacagagaaaggtggacagttcagtctccacattttgaagcattccaccattgtgttgaaaccaaggtctttctgaactttgtgatcttattaattaaggggttctgaagaaatttgatagtgttgg

SEQ ID NO: 284 - protein, 242 aa, NICOTIANATABACUM
MDLLLLEKTLIGLFFAILIALIVSKLRSKRFKLPPGPIPVPVFGNWLQVGDDLNHRNLTDYAKKFGDLFLLRMGQRNLVVVSSPELAKEVLHTQGVEFGSRTRNVVFDIFTGKGQDMVFTVYGEHWRKMRRIMTVPFFTNKVVQQYRGGWEFEVASVIEDVKKNPESATNGIVLRRRLQLMMYNNMFRIMFDRRFESEDDPLFVKLKALNGERSRLAQSFEYNYGDFIPILRPFFERLFEDL

SEQ ID NO: 285 - DNA, 1544 bp, NICOTIANATABACUM; identical to SEQ ID NO: 252

SEQ ID NO: 286 - protein, 501 aa, NICOTIANATABACUM
MLFLLFVALPFILIFLLPKFKNGGNNRLPPGPIGLPFIGNLHQYDSITPHIYFWKLSKKYGKIFSLKLASTNVVVVSSAKLAKEVLKKQDLIFCSRPSILGQQKLSYYGRDIAFAPYWREMRKICVLHLFSLKKVQLFSPIREDEVFRMIKKISKQASTSQIINLSNLMISLTSTIICRVAFGVRFEEEAHARKRFDFLLAEAQEMMASFFVSDFFPFLSIDKLSGLTYRLERNFKDLDNFYEELIEQHQNPNKPKYMEGDIVDLLLQLKKEKLTPLDLTMEDIKGILMNVLVAGSDTSAAATVWAMTALIKNPKAMEKVQLEIRKSVGKKGIVNEEDVQNIPYFKAVIKEIFRLYPPAPLLVPRESMEKTILEGYEIRPRTIVHVNAWAIARDPEIWENPDEFIPERFLNSSIDYKGQDFELLPFGAGRRGCPGIALGVASMELALSNLLYAFDWELPYGVKKEDIDTNVRPGIAMHKKNELCLVPKKLFINYIGTWISC

SEQ ID NO: 287 - DNA, 1764 bp, NICOTIANATABACUM
gtgaggtttgaatcctctgcctcaatgaaactcaccaaattggttttctaatttccatctaaaatattgtccaaagctaaagattctttctccttaaatagtcaactttagtggttcctcttcatttcatagctcaatctttcttattttgattcaaccatggagaaccaatactcctactcattctcttcctacttctacttagctatagtactgtttcttcttccaattttggtcaaatatttcttccatcggagaagaaatttacctccaagtccattttctcttccaataattggtcacctttaccttctcaagaaaactctccatctcactctaacatccttatcagctaaatatggtcctgttttatacctcaaattgggctctatgcctgtgattgttgtgtcctcaccatctgctgttgaagaatgtttaaccaagaatgatatcatattcgcaaataggcccaagaccgtggctggtgacaagtttacctacaattatactgtttatgtttgggcaccctatggccaactttggagaattcttcgccgattaactgtcgttgaactcttctcttcacatagcctacagaaaacttctatccttagagatcaagaagttgcaatatttatccgttcgttatacaaattctcaaaggatagtagcaaaaaagtcgatttgaccaactggtcttttactttggttttcaatcttatgaccaaaattattgctgggagacatattgtgaaggaggaagatgctggcaaggaaaagggcattgaaattattgaaaaacttagagggactttcttagtaactacatcattcttgaatatgtgtgatttcttgccagtattcaggtgggttggttacaaagggctggagaagaagatggcctcaattcacaatagaagaaatgaattcttgaacagcttgcttgatgaatttcgacacaagaaaagtagtgcttcacaatctaacacaactgttggaaacatggagaagaaaaccacactgattgaaaagctcttgtctcttcaagaatcagagcctgaattctacactgatgatatatcaaaagtattatgctggtagtttttgttgcaggaacagagacctcatcaacaaccatccaatgggtaatgaggcttcttgtagctcaccctgaggcattgtataagctacgagctgacattgacagtaaagttgggaataagcgcttgctgaatgaatcagacctcaacaagcttccgtatttgcattgtgttgttaatgagacaatgagattatacactccgataccacttttattgcctcattattcaactaaagattgtattgtggaaggatatgatgtaccaaaacatacaatgttgtttgtcaacgcttgggccattcacagggatcccaaggtatgggaggagcctgacaagttcaagccagagagatttgaggcaacagaaggggaaacagaaaggttcaattacaagcttgtaccatttggaatggggagaagagcgtgccctggagctgatatggggttgcgagcagtttctttggcattaggtgcacttattcaatgctttgactggcaaattgaggaagcggaaagcttggaggaaagctataattctagaatgactatgcagaacaagcctttgaaggttgtctgcactccacgcgaagatcttggccagcttctatcccaactctaaggcaatttatcaatgccaaacgtaatcttcatctaccactatg

SEQ ID NO: 288 - protein, 520 aa, NICOTIANATABACUM; identical to SEQ ID NO: 199

SEQ ID NO: 289 - DNA, 1694 bp, NICOTIANATABACUM
aacatcctttccttcttccaaaaatggagcttcaatcttctcctttcaatttaatttctttgttcctcttcttttcttttctttttattctagtgaagaaatggaatgccaaaatcccaaagttacctccaggtccgtggaggcttccctttattggaagcctccatcacttgaagggaaaacttccacaccataatcttagagatctagcgcgaaaatatggacctctcatgtacttacaactcggagaaattcctgtagttgtaatatcttcgccacgtgtagcaaaagctgtactaaaaactcatgatctcgcttttgcaactagaccacgattcatgtcctcagacattgtgttttacaaaagcagggacatctcttttgccccatttggtgattactggagacagatgcgtaaaatattgactcaggaactcctgagcaacaagatgctcaagtcatatagcttaatccgaaaggatgagctctcgaagctcctctcatcgattcgtttggaaacaggttctgcagtgaacataaatgaaaagcttctctggtttacgagctgcatgacctgtagattagcctttggaaaaatatgcaatgatcgggatgagttgatcatgctaattagggagatattaacattatcaggaggatttgatgtgggtgatttgttcccttcctggaaattacttcataatatgagcaacatgaaagctaggttgacgaatgtacaccacaagtatgatttagttatggagaacatcatcaatgagcaccaagagaatcatgcagcagggataaagggtaacaacgagtttggtggcgaagatatgatcgatgctctactgagggctaaggagaataatgagcttcaatttcctatcgaaaatgacaacatgaaagcagtaattctggacttgtttattgctggaactgaaacttcatatactgcaattatatgggcactatcagaattgatgaagcacccaagtgtgatggccaaggcacaagctgaagtgagaaaagtcttcaaagaaaatgaaaatttcgacgaaaatgatcttgacaagttgccatacctaaaatcagtgattaaagaaacactaaggatgcaccctccagttcctttgttagggcctagagaatgcagggaccaaacagagatcgatggctacactgtacctattaaagctagagttatggttaatgcttgggcgataggaagagatcctgaaagttgggaagatcctgaaagtttcaaaccggagcgatttgaaaatacttctgttgatcttacaggaaatcactatcagttcattcctttcggttcaggaagaagaatgtgtccaggaatgtcgtttggtttagttaacacagggcatcctttagcccagttgctctattgctttgactggaaactccctgacaaggttaatgcaaatgattttcgcactactgaaacaagtagagtttttgcagcaagcaaagatgacctctacttgattcccacaaatcacagggagcaagaatagcttaatttaatggagttcttggaagaattaaagaagaagggctatataggtgagattttttgtatggttgcaaggtttttagttcatacaataagacaatacattatattccagtattgtgtatcatgtataataaggttccttttgtttaaaaaa

SEQ ID NO: 290 - protein, 504 aa, NICOTIANATABACUM; identical to SEQ ID NO: 158

SEQ ID NO: 291 - DNA, 1573 bp, NICOTIANATABACUM
atgctttctcccatagaagccattgtaggactagtaaccttcacatttctcttcttcttcctatggacaaaaaaatctcaaaaaccttcaaaacccttaccaccgaaaatccccggaggatggccggtaatcggccatcttttccacttcaatgacgacggcgacgaccgtccattagctcgaaaactcggagacttagctgacaaatacggccccgttttcacttttcggctaggccttccccttgtcttagttgtaagcagttacgaagctgtaaaagactgtttctctacaaatgacgccattttttccaatcgtccagcttttctttacggcgattaccttggctacaataatgccatgctatttttggccaattacggaccttactggcgaaaaaatcgaaaattagttattcaggaagttctctccgctagtcgtctcgaaaaattcaaacacgtgagatttgcaagaattcaagcgagcattaagaatttatatactcgaattgatggaaattcgagtacgataaatttaactgattggttagaagaattgaattttggtctgatcgtgaagatgatcgctgaaaaaaattatgaatccggtaaaggagatgaacaattggagagatttaagaaagcgtttaaggattttatgattttatcaatggagtttgtgttatgggatgcatttccaattccattatttaaatgggtggattttcaagggcatgttaaggctatgaaaaggacttttaaagatatagattctgtttttcagaattggttagaggaacatattaataaaagagaaaaaatggaggttaatgcagaagggaatgaacaagatttcattgatgtggtgctttcaaaaatgagtaatgaatatcttggtgaaggttactctcgtgatactgtcattaaagcaacggtgtttagtttggtcttggatgcagcagacacagttgctcttcacataaattggggaatggcattattgataaacaatcaaaaggccttgacgaaagcacaagaagagatagacacaaaagttggtaaggacagatgggtagaagagagtgatattaaggatttggtatacctccaagctattgttaaagaagtgttacgattatatccaccaggacctttgttagtaccacacgaaaatgtagaagattgtgttgttagtggatatcacattcctaaagggacaagattattcgcaaacgtcatgaaactgcaacgtgatcctaaactctggtctgatcctgatactttcgatccagagagattcattgctactgatattgactttcgtggtcagtactataagtatatcccgtttggttctggaagacgatcttgtccagggatgacttatgcattgcaagtggaacacttaacaatggcacatttgatccaaggtttcaattacagaactccaaatgacgagcccttggatatgaaggaaggtgcaggcataactatacgtaaggtaaatcctgtggaactgataatagcgcctcgcctggcacctgagctttattaaaacctaagatcatcttgct

SEQ ID NO: 292 - protein, 517 aa, NICOTIANATABACUM
MLSPIEAIVGLVTFTFLFFFLWTKKSQKPSKPLPPKIPGGWPVIGHLFHFNDDGDDRPLARKLGDLADKYGPVFTFRLGLPLVLVVSSYEAVKDCFSTNDAIFSNRPAFLYGDYLGYNNAMLFLANYGPYWRKNRKLVIQEVLSASRLEKFKHVRFARIQASIKNLYTRIDGNSSTINLTDWLEELNFGLIVKMIAEKNYESGKGDEQLERFKKAFKDFMILSMEFVLWDAFPIPLFKWVDFQGHVKAMKRTFKDIDSVFQNWLEEHINKREKMEVNAEGNEQDFIDVVLSKMSNEYLGEGYSRDTVIKATVFSLVLDAADTVALHINWGMALLINNQKALTKAQEEIDTKVGKDRWVEESDIKDLVYLQAIVKEVLRLYPPGPLLVPHENVEDCVVSGYHIPKGTRLFANVMKLQRDPKLWSDPDTFDPERFIATDIDFRGQYYKYIPFGSGRRSCPGMTYALQVEHLTMAHLIQGFNYRTPNDEPLDMKEGAGITIRKVNPVELIIAPRLAPELY

SEQ ID NO: 293 - DNA, 1573 bp, NICOTIANATABACUM
atgctttctcccatagaagccattgtaggactagtaaccttcacatttctcttcttcttcctatggacaaaaaaatctcaaaaaccttcaaaacccttaccaccgaaaatccccggaggatggccggtaatcggccatcttttccacttcaatgacgacggcgacgaccgtccattagctcgaaaactcggagacttagctgacaaatacggccccgttttcacttttcggctaggccttccccttgtcttagttgtaagcagttacgaagctgtaaaagactgtttctctacaaatgacgccattttttccaatcgtccagcttttctttacggcaattaccttggctacaataatgccatgctatttttggccaattacggaccttactggcgaaaaaatcgaaaattagttattcaggaagttctctccgctagtcgtctcgaaaaattcaaacacgtgagatttgcaagaattcaagcgagcattaagaatttatatactcgaattgatggaaattcgagtacgataaatttaactgattggttagaagaattgaattttggtctgatcgtgaagatgatcgctggaaaaaattatgaatccggtaaaggagatgaacaagtggagagatttaagaaagcgtttaaggatcttatgattttatcaatggagtttgtgttatgggatgcatttccaattccattatttaaatgggtggattttcaagggcatgttaaggctatgaaaaggacttttaaagatatagattctgtttttcagaattggttagaggaacatattaataaaagagaaaaaatggaggttaatgcagaagggaatgaacaagatttcattgatgtggtgctttcaaaaatgagtaatgaatatcttggtgaaggttactctcgtgatactgtcattaaagcaacggtgtttagtttggtcttggatgcagcagacacagttgctcttcacataaattggggaatggcattattgataaacaatcaaaaggccttgacgaaagcacaagaagagatagacacaaaagttggtaaggacagatgggtagaagagagtgatattaaggatttggtatacctccaagctattgttaaagaagtgttacgattatatccaccaggacctttgttagtaccacacgaaaatgtagaagattgtgttgttaggggatatcacattcctaaagggacaagattattcgcaaacgtcatgaaactgcaacgtgatcctaaactctggtctgatcctgatactttcgatccagagagattcattgctactgatattgactttcgtggtcagtactataagtatatcccgtttggttctggaagacgatcttgtccagggatgacttatgcattgcaagtggaacacttaacaatggcacatttgatccaaggtttcaattacagaactccaaatgacgagcccttggatatgaaggaaggtgcaggcataactatacgtaaggtaaatcctgtggaactgataatagcgcctcgcctggcacctgagctttattaaaacctaagatcatcttgct

SEQ ID NO: 294 - protein, 517 aa, NICOTIANATABACUM
MLSPIEAIVGLVTFTFLFFFLWTKKSQKPSKPLPPKIPGGWPVIGHLFHFNDDGDDRPLARKLGDLADKYGPVFTFRLGLPLVLVVSSYEAVKDCFSTNDAIFSNRPAFLYGNYLGYNNAMLFLANYGPYWRKNRKLVIQEVLSASRLEKFKHVRFARIQASIKNLYTRIDGNSSTINLTDWLEELNFGLIVKMIAGKNYESGKGDEQVERFKKAFKDLMILSMEFVLWDAFPIPLFKWVDFQGHVKAMKRTFKDIDSVFQNWLEEHINKREKMEVNAEGNEQDFIDVVLSKMSNEYLGEGYSRDTVIKATVFSLVLDAADTVALHINWGMALLINNQKALTKAQEEIDTKVGKDRWVEESDIKDLVYLQAIVKEVLRLYPPGPLLVPHENVEDCVVRGYHIPKGTRLFANVMKLQRDPKLWSDPDTFDPERFIATDIDFRGQYYKYIPFGSGRRSCPGMTYALQVEHLTMAHLIQGFNYRTPNDEPLDMKEGAGITIRKVNPVELIIAPRLAPELY

SEQ ID NO: 295 - DNA, 1573 bp, NICOTIANATABACUM
atgctttctcccatagaagccattgtaggactagtaaccttcacatttctcttcttcttcctatggacaaaaaaatctcaaaaaccttcaaaacccttaccaccgaaaatccccggaggatggccggtaatcggccatcttttccacttcaatgacgacggcgacgaccgtccattagctcgaaaactcggagacttagctgacaaatacggccccgttttcacttttcggctaggccttccccttgtcttagttgtaagcagttacgaagctgtaaaagactgtttctctacaaatgacgccattttttccaatcgtccagcttttctttacggcgattaccttggctacaataatgccatgctatttttggccaattacggaccttactggcgaaaaaatcgaaaattagttattcaggaagttctctccgctagtcgtctcgaaaaattcaaacacgtgagatttgcaagaattcaagcgagcattaagaatttatatactcgaattgatggaaattcgagtacgataaatttaactgattggttagaagaattgaattttggtctgatcgtgaagatgatcgctggaaaaaattatgaatccggtaaaggagatgaacaagtggagagatttaagaaagcgtttaaggattttatgattttatcaatggagtttgtgttatgggatgcatttccaattccattatttaaatgggtggattttcaagggcatgttaaggctatgaaaaggacttttaaagatatagattctgtttttcagaattggttagaggaacatattaataaaagagaaaaaatggaggttaatgcagaagggaatgaacaagatttcattgatgtggtgctttcaaaaatgagtaatgaatatcttggtgaaggttactctcgtgatactgtcattaaagcaacggtgtttagtttggtcttggatgcagcagacacagttgctcttcacataaattggggaatggcattattgataaacaatcaaaaggccttgacgaaagcacaagaagagatagacacaaaagttggtaaggacagatgggtagaagagagtgatattaaggatttggtatacctccaagctattgttaaagaagtgttacgattatatccaccaggacctttgttagtaccacacgaaaatgtagaagattgtgttgttagtggatatcacattcctaaagggacaagattattcgcaaacgtcgtgaaactgcaacgtgatcctaaactctggtctgatcctgatactttcgatccagagagattcattgctactgatattgactttcgtggtcagtactataagtatatcccgtttggttctggaagacgatcttgtccagggatgacttatgcattgcaagtggaacacttaacaatggcacatttgatccaaggtttcaattacagaactccaaatgacgagcccttggatatgaaggaaggtgcaggcataactatacgtaaggtaaatcctgtggaactgataatagcgcctcgcctggcacctgagctttattaaaacctaagatcatcttgct

SEQ ID NO: 296 - protein, 517 aa, NICOTIANATABACUM
MLSPIEAIVGLVTFTFLFFFLWTKKSQKPSKPLPPKIPGGWPVIGHLFHFNDDGDDRPLARKLGDLADKYGPVFTFRLGLPLVLVVSSYEAVKDCFSTNDAIFSNRPAFLYGDYLGYNNAMLFLANYGPYWRKNRKLVIQEVLSASRLEKFKHVRFARIQASIKNLYTRIDGNSSTINLTDWLEELNFGLIVKMIAGKNYESGKGDEQVERFKKAFKDFMILSMEFVLWDAFPIPLFKWVDFQGHVKAMKRTFKDIDSVFQNWLEEHINKREKMEVNAEGNEQDFIDVVLSKMSNEYLGEGYSRDTVIKATVFSLVLDAADTVALHINWGMALLINNQKALTKAQEEIDTKVGKDRWVEESDIKDLVYLQAIVKEVLRLYPPGPLLVPHENVEDCVVSGYHIPKGTRLFANVVKLQRDPKLWSDPDTFDPERFIATDIDFRGQYYKYIPFGSGRRSCPGMTYALQVEHLTMAHLIQGFNYRTPNDEPLDMKEGAGITIRKVNPVELIIAPRLAPELY

SEQ ID NO: 297 - DNA, 1577 bp, NICOTIANATABACUM
cataatgctttctcccatagaagccattgtaggactagtaaccttcacatttctcttcttcttcctatggacaaaaaaatctcaaaaaccttcaaaacccttaccaccgaaaatccccggaggatggccggtaatcggccatcttttccacttcaatgacgacggcgacgaccgtccattagctcgaaaactcggagacttagctgacaaatacggccccgttttcacttttcggctaggccttccccttgtcttagttgtaagcagttacgaagctgtaaaagactgtttctctacaaatgacgccattttttccaatcgtccagcttttctttacggcgattaccttggctacaataatgccatgctatttttggccaattacggaccttactggcgaaaaaatcgaaaattagttattcaggaagttctctccgctagtcgtctcgaaaaattcaaacacgtgagatttgcaagaattcaagcgagcattaagaatttatatactcgaattgatggaaattcgagtacgataaatttaactgattggttagaagaattgaattttggtctgatcgtgaagatgatcgctggaaaaaattatgaatccggtaaaggagatgaacaagtggagagatttaagaaagcgtttaaggattttatgattttatcaatggagtttgtgttatgggattcatttccaattccattatttaaatgggtggattttcaagggcatgttaaggctatgaaaaggacttttaaagatatagattctgtttttcagaattggttagaggaacatattaataaaagagaaaaaatggaggttaatgcagaagggaatgaacaagatttcattgatgtggtgctttcaaaaatgagtaatgaatatcttggtgaaggttactctcgtgatactgtcattaaagcaacggtgtttagtttggtcttggatgcagcagacacagttgctcttcacataaattggggaatggcattattgatgaacaatcaaaaggccttgacgaaagcacaagaagagatagacacaaaagttggtaaggacagatgggtagaagagagtgatattaaggatttggtatacctccaagctattgttaaagaagtgttacgattatatccaccaggacctttgttagtaccacacgaaaatgtagaagattgtgttgttagtggatatcacattcctaaagggacaagattattcgcaaacgtcatgaaactgcaacgtgatcctaaactctggtctgatcctgatactttcgatccagagagattcattgctactgatattggctttcgtggtcagtactataagtatatcccgtttggttctggaagacgatcttgtccagggatgacttatgcattgcaagtggaacacttaacaatggcacatttgatccaaggtttcaattacagaactccaaatgacgagcccttggatatgaaggaaggtgcaggcataactatacgtaaggtaaatcctgtggaactgataatagcgcctcgcctggcacctgagctttattaaaacctaagatcatcttgct

SEQ ID NO: 298 - protein, 517 aa, NICOTIANATABACUM
MLSPIEAIVGLVTFTFLFFFLWTKKSQKPSKPLPPKIPGGWPVIGHLFHFNDDGDDRPLARKLGDLADKYGPVFTFRLGLPLVLVVSSYEAVKDCFSTNDAIFSNRPAFLYGDYLGYNNAMLFLANYGPYWRKNRKLVIQEVLSASRLEKFKHVRFARIQASIKNLYTRIDGNSSTINLTDWLEELNFGLIVKMIAGKNYESGKGDEQVERFKKAFKDFMILSMEFVLWDSFPIPLFKWVDFQGHVKAMKRTFKDIDSVFQNWLEEHINKREKMEVNAEGNEQDFIDVVLSKMSNEYLGEGYSRDTVIKATVFSLVLDAADTVALHINWGMALLMNNQKALTKAQEEIDTKVGKDRWVEESDIKDLVYLQAIVKEVLRLYPPGPLLVPHENVEDCVVSGYHIPKGTRLFANVMKLQRDPKLWSDPDTFDPERFIATDIGFRGQYYKYIPFGSGRRSCPGMTYALQVEHLTMAHLIQGFNYRTPNDEPLDMKEGAGITIRKVNPVELIIAPRLAPELY

SEQ ID NO: 299 - DNA, 1573 bp, NICOTIANATABACUM
atgctttctcccatagaagccattgtaggactagtaaccttcacatttctcttcttcttcctatggacaaaaaaatctcaaaaaccttcaaaacccttaccaccgaaaatccccggaggatggccggtaatcggccatcttttccacttcaatgacgacggcgacgaccgtccattagctcgaaaactcggagacttagctgacaaatacggccccgttctcacttttcggctaggccttccccttgtcttagttgtaagcagttacgaagctgtaaaagactgtttctctacaaatgacgccattttttccaatcgtccagcttttctttacggcgattaccttggctacaataatgccatgctatttttggccaattacggaccttactggcgaaaaaatcgaaaattagttattcaggaagttctctccgctagtcgtctcgaaaaattcaaacacgtgagatttgcaagaattcaagcgagcattaagaatttatatactcgaattgatggaaattcgagtacgataaatttaactgattggttagaagaattgaattttggtctgatcgtgaagatgatcgctggaaaaaattatgaatccggtaaaggagatgaacaagtggagagatttaagaaagcgtttaaggattttatgattttatcaatggagtttgtgttatgggatgcatttccaattccattatttaaatgggtggactttcaagggcatgttaaggctatgaaaaggacttttaaagatatagattctgtttttcagaattggttagaggaacatattaataaaagagaaaaaatggaggttaatgcagaagggaatgaacaagatttcattgatgtggtgctttcaaaaatgagtaatgaatatcttggtgaaggttactctcgtgatactgtcattaaagcaacggtgtttagtttggtcttggatgcagcagacacagttgctcttcacataaattggggaatggcattattgataaacaatcaaaaggccttgacgaaagcacaagaagagatagacacaaaagttggtaaggacagatgggtagaagagagtgatattaaggatttggtatacctccaagctattgttaaagaagtgttacgattatatccaccaggacctttgttagtaccacacgaaaatgtagaagattgtgttgttagtggatatcacattcctaaagggacaagattattcgcaaacgtcatgaaactgcaacgtgatcctaaactctggtctgatcctgatactttcgatccagagagattcattgctactgatattgactttcgtggtcagtactataagtatatcccgtttggttctggaagacgatcttgtccagggatgacttatgcattgcaagtggaacacttaacaatggcacatttgatccaaggtttcaattacagaactccaaatgacgagcccttggatatgaaggaaggtgcaggcataactatacgtaaggtaaatcctgtggaactgataatagcgcctcgcctggcacctgagctttattaaaacctaagatcatcttgct

SEQ ID NO: 300 - protein, 517 aa, NICOTIANATABACUM
MLSPIEAIVGLVTFTFLFFFLWTKKSQKPSKPLPPKIPGGWPVIGHLFHFNDDGDDRPLARKLGDLADKYGPVFTFRLGLPLVLVVSSYEAVKDCFSTNDAIFSNRPAFLYGDYLGYNNAMLFLANYGPYWRKNRKLVIQEVLSASRLEKFKHVRFARIQASIKNLYTRIDGNSSTINLTDWLEELNFGLIVKMIAGKNYESGKGDEQVERFKKAFKDFMILSMEFVLWDAFPIPLFKWVDFQGHVKAMKRAFKDIDSVFQNWLEEHINKREKMEVNAEGNEQDFIDVVLSKMSNEYLGEGYSRDTVIKATVFSLVLDAADTVALHINWGMALLINNQKALTKAQEEIDTKVGKDRWVEESDIKDLVYLQAIVKEVLRLYPPGPLLVPHENVEDCVVSGYHIPKGTRLFVNVMKLQRDPKLWSDPDTFDPERFIATDIDFRGQYYKYIPFGSGRRSCPGMTYALQVEHLTMAHLIQGFNYRTPNDEPLDMKEGAGITIRKVNPVELIIAPRLAPELY

SEQ ID NO: 301 - DNA, 1573 bp, NICOTIANATABACUM
atgctttctcccatagaagccattgtaggactagtaaccttcacatttctcttcttcttcctatggacaaaaaaatctcaaaaaccttcaaaacccttaccaccgaaaatccccggaggatggccggtaatcggccatcttttccacttcaatgacgacggcgatgaccgtccattagctcgaaaactcggagacttagctgacaaatacggccccgttttcacttttcggctaggccttccccttgtcttagttgtaagcagttacgaagctgtaaaagactgtttctctacaaatgacgccattttttccaatcgtccagcttttctttacggcgattaccttggctacaataatgccatgctatttttggccaattacggaccttactggcgaaaaaatcgaaaattagttattcaggaagttctctccgctagtcgtctcgaaaaattcaaacacgtgagatttgcaagaattcaagcgagcattaagaatttatatactcgaattgatggaaattcgagtacgataaatttaactgattggttagaagaattgaattttggcctgatcgtgaagatgatcgctggaaaaaattatgaatccggtaaaggagatgaacaagtggagagatttaagaaagcgtttaaggattttatgattttatcaatggagtttgtgttatgggatgcatttccaattccattatttaaatgggtggattttcaagggcatgttaaggctatgaaaagggcttttaaagatatagattctgtttttcagaattggttagaggaacatattaataaaagagaaaaaatggaggttaatgcagaagggaatgaacaagatttcattgatgtggtgctttcaaaaatgagtaatgaatatcttggtgaaggttactctcgtgatactgtcattaaagcaacggtgtttagtttggtcttggatgcagcagacacagttgctcttcacataaattggggaatggcattattgataaacaatcaaaaggccttgacgaaagcacaagaagagatagacacaaaagttggtaaggacagatgggtagaagagagtgatattaaggatttggtatacctccaagctattgttaaagaagtgttacgattatatccaccaggacctttgttagtaccacacgaaaatgtagaagattgtgttgttagtggatatcacattcctaaagggacaagattattcgtaaacgtcatgaaactgcaacgtgatcctaaactctggtctgatcctgatactttcgatccagagagattcattgctactgatattgactttcgtggtcagtactataagtatatcccgtttggttctggaagacgatcttgtccagggatgacttatgcattgcaagtggaacacttaacaatggcacatttgatccaaggtttcaattacagaactccaaatgacgagcccttggatatgaaggaaggtgcaggcataactatacgtaaggtaaatcctgtggaactgataatagcgcctcgcctggcacctgagctttattaaaacctaagatcatcttgct

SEQ ID NO: 302 - protein, 517 aa, NICOTIANATABACUM; identical to SEQ ID NO: 300

SEQ ID NO: 303 - DNA, 1573 bp, NICOTIANATABACUM
atgctttctcccatagaagccattgtaggactagtaaccttcacatttctcttcttcttcctatggacaaaaaaatctcaaaaaccttcaaaacccttaccaccgaaaatccccggaggatggccggtaatcggccatcttttccacttcaatgacgacggcgacgaccgtccattagctcgaaaactcggagacttagctgacaaatacggccccgttttcacttttcggctaggccttccccttgtcttagttgtaagcagttacgaagctgtaaaagactgtttctctacaaatgacgccattttttccaatcgtccagcttttctttacggcgattaccttggctacaataatgccatgctatttttggccaattacggaccttactggcgaaaaaatcgaaaattagttattcaggaagttctctccgctagtcgtctcgaaaaattcaaacacgtgagatttgcaagaattcaagcgagcattaagaatttatatactcgaattgatggaaattcgagtacgataaatttaactgattggttagaagaattgaattttggtctggtcgtgaagatgatcgctggaaaaaattatgaatccggtaaaggagatgaacaagtggagagatttaagaaagcgtttgaggattttatgattttatcaatggagtttgtgttatgggatgcatttccaattccattatttaaatgggtggattttcaagggcatgttaaggctatgaaaaggacttttaaagatatagattctgtttttcagaattggttagaggaacatattaataaaagagaaaaaatggaggttaatgcagaagggaatgaacaagatttcattgatgtggtgctttcaaaaatgagtaatgaatatcttggtgaaggttactctcgtgatactgtcattaaagcaacggtgtttagtttggtcttggatgcagcagacacagttgctcttcacataaattggggaatggcattattgataaacaatcaaaaggccttgacgaaagcacaagaagagatagacacaaaagttggtaaggacagatgggtagaagagagtgatattaaggatttggtatacctccaagctattgttaaagaagtgttacgattatatccaccaggacctttgttagtaccacacgaaaatgtagaagattgtgttgttagtggatatcacattcctaaagggacaagattattcgcaaacgtcatgaaactgcaacgtgatcctaaactctggtctgatcctgatactttcgatccagagagattcattgctactgatattgactttcgtggtcagtactataagtatatcccgtttggttctggaagacgatcttgtccagggatgacttatgcattgcaagtggaacacttaacaatggcacatttgatccaaggtttcaattacagaactccaaatgacgagcccttggatatgaaggaaggtgcaggcataactatacgtaaggtaaatcctgtggaactgataatagcgcctcgcctggcacctgagctttattaaaacctaagatcatcttgct

SEQ ID NO: 304 - protein, 517 aa, NICOTIANATABACUM
MLSPIEAIVGLVTFTFLFFFLWTKKSQKPSKPLPPKIPGGWPVIGHLFHFNDDGDDRPLARKLGDLADKYGPVFTFRLGLPLVLVVSSYEAVKDCFSTNDAIFSNRPAFLYGDYLGYNNAMLFLANYGPYWRKNRKLVIQEVLSASRLEKFKHVRFARIQASIKNLYTRIDGNSSTINLTDWLEELNFGLVVKMIAGKNYESGKGDEQVERFKKAFEDFMILSMEFVLWDAFPIPLFKWVDFQGHVKAMKRTFKDIDSVFQNWLEEHINKREKMEVNAEGNEQDFIDVVLSKMSNEYLGEGYSRDTVIKATVFSLVLDAADTVALHINWGMALLINNQKALTKAQEEIDTKVGKDRWVEESDIKDLVYLQAIVKEVLRLYPPGPLLVPHENVEDCVVSGYHIPKGTRLFANVMKLQRDPKLWSDPDTFDPERFIATDIDFRGQYYKYIPFGSGRRSCPGMTYALQVEHLTMAHLIQGFNYRTPNDEPLDMKEGAGITIRKVNPVELIIAPRLAPELY

SEQ ID NO: 305 - DNA, 1573 bp, NICOTIANATABACUM
atgctttctcccatagaagccattgtaggactagtaaccttcacatttctcttcttcttcctatggacaaaaaaatctcaaaaaccttcaaaacccttaccaccgaaaatccccggaggatggccggtaatcggccatcttttccacttcaatgacgacggcgacgaccgtccattagctcaaaaactcggagacttagctgacaaatacggccccgttttcacttttcggctaggccttccccttgtcttagttgtaagcagttacgaagctgtaaaagactgtttctctacagatgacgccattttttccaatcgtccagcttttctttacggcgattaccttggctacaataatgccatgctatttttggccaattacggaccttactggcgaaaaaatcgaaaattagttattcaggaagttctctccgctagtcgtctcgaaaaattcaaacacgtgagatttgcaagaattcaagcgagcattaagaatttatatactcgaattgatggaaattcgagtacgataaatttaactgattggttagaagaattgaattttggtctgatcgtgaagatgatcgctggaaaaaattatgaatccggtaaaggagatgaacaagtggagagatttaagaaagcgtttaaggattttatgattttatcaatggagtttgtgttatgggatgcatttccaattccattatttaaatgggtggattttcaagggcatgttaaggctatgaaaaggacttttaaagatatagattctgtttttcagaattggttagaggaacatattaataaaagagaaaaaatggaggttaatgcagaagggaatgaacaagatttcattgatgtggtgctttcaaaaatgagtaatgaatatcttggtgaaggttactctcgtgatactgtcattaaagcaacggtgtttggtttggtcttggatgcagcagacacagttgctcttcacataaattggggaatggcattattgataaacaatcaaaaggccttgacgaaagcacaagaagagatagacacaaaagttggtaaggacagatgggtagaagagagtgatattaaggatttggtatacctccaagctattgttaaagaagtgttacgattatatccaccaggacctttgttagtaccacacgaaaatgtagaagattgtgttgttagtggatatcacattcctaaagggacaagattattcgcaaacgtcatgaaactgcaacgtgatcctaaactctggtctgatcctgatactttcgatccagagagattcattgctactgatattgactttcgtggtcagtactataagtatatcccgtttggttctggaagacgatcttgtccagggatgacttatgcattgcaagtggaacacttaacaatagcacatttgatccaaggtttcaattacagaactccaaatgacgagcccttggatatgaaggaaggtgcaggcataactatacgtaaggtaaatcctgtggaactgataatagcgcctcgcctggcacctgagctttattaaaacctaagatcatcttgct

SEQ ID NO: 306 - protein, 517 aa, NICOTIANATABACUM
MLSPIEAIVGLVTFTFLFFFLWTKKSQKPSKPLPPKIPGGWPVIGHLFHFNDDGDDRPLAQKLGDLADKYGPVFTFRLGLPLVLVVSSYEAVKDCFSTDDAIFSNRPAFLYGDYLGYNNAMLFLANYGPYWRKNRKLVIQEVLSASRLEKFKHVRFARIQASIKNLYTRIDGNSSTINLTDWLEELNFGLIVKMIAGKNYESGKGDEQVERFKKAFKDFMILSMEFVLWDAFPIPLFKWVDFQGHVKAMKRTFKDIDSVFQNWLEEHINKREKMEVNAEGNEQDFIDVVLSKMSNEYLGEGYSRDTVIKATVFGLVLDAADTVALHINWGMALLINNQKALTKAQEEIDTKVGKDRWVEESDIKDLVYLQAIVKEVLRLYPPGPLLVPHENVEDCVVSGYHIPKGTRLFANVMKLQRDPKLWSDPDTFDPERFIATDIDFRGQYYKYIPFGSGRRSCPGMTYALQVEHLTIAHLIQGFNYRTPNDEPLDMKEGAGITIRKVNPVELIIAPRLAPELY

SEQ ID NO: 307 - DNA, 1575 bp, NICOTIANATABACUM
atgctttctcccatagaagccattgtaggactagtaaccttcacatttctcttcttcttcctatggacaaaaaaatctcaaaaaccttcaaaacccttaccaccgaaaatccccggaggatggccggtaatcggccatcttttccacttcaatgacgacggcgacgaccgtccattagctcgaaaactcggagacttagctgacaaatacggccccgttttcacttttcggctaggccttccccttgtcttagttgtaagcagttacgaagctgtaaaagactgtttctctacaaatgacgccattttttccaatcgtccagcttttctttacggcgattaccttggctacaataatgccatgctatttttggccaattacggaccttactggcgaaaaaatcgaaaattagttattcaggaagttctctccgctagtcgtctcgaaaaattcaaacacgtgagatttgcaagaattcaagcgagcattaagaatttatatactcgaattgatggaaattcgagtacgataaatttaactgattggttagaagaattgaattttggtctgatcgtgaagatgatcgctggaaaaaattatgaatccggtaaaggagatgaacaagtggagagatttaagaaagcgtttaaggattttatgattttatcaatggagtttgtgttatgggatgcatttccaattccattatttaaatgggtggattttcaagggcatgttaaggctatgaaaaggacttttaaagatatagattctgtttttcagaattggttagaggaacatattaataaaagagaaaaaatggaggttaatgcagaagggaatgaacaagatttcattgatgtggtgctttcaaaaatgagtaatgaatatcttggtgaaggttactctcgtgatactgtcattaaagcaacggtgtttagtttggtcttggatgcagcagacacagttgctcttcacataaattggggaatggcattattgataaacaatcaaaaggccttgacgaaagcacaagaagagatagacacaaaagttggtaaggacagatgggtagaagagagtgatattaaggatttggtatacctccaagctattgttaaagaagtgttacgattatatccaccaggacctttgttagtaccacacgaaaatgtagaagattgtgttgttagtggatatcacattcctaaagggacaagattattcgcaaacgtcatgaaactgcaacgtgatcctaaactctggtctgatcctgatactttcgatccagagagattcattgctactgatattgactttcgtggtcagtactataagtatatcccgtttggttctggaagacgatcttgtccagggatgacttatgcattgcaagtggaacacttaacaatggcacatttgatccaaggtttcaattacagaactccaaatgacgagccctcggatatgaaggaaggtgcaggcataactatacgtaaagtaaatcctgtggaactgataatagcgcctcgcctggcacctgagctttattaaaacctaagatcatcttgcttg

SEQ ID NO: 308 - protein, 517 aa, NICOTIANATABACUM
MLSPIEAIVGLVTFTFLFFFLWTKKSQKPSKPLPPKIPGGWPVIGHLFHFNDDGDDRPLARKLGDLADKYGPVFTFRLGLPLVLVVSSYEAVKDCFSTNDAIFSNRPAFLYGDYLGYNNAMLFLANYGPYWRKNRKLVIQEVLSASRLEKFKHVRFARIQASIKNLYTRIDGNSSTINLTDWLEELNFGLIVKMIAGKNYESGKGDEQVERFKKAFKDFMILSMEFVLWDAFPIPLFKWVDFQGHVKAMKRTFKDIDSVFQNWLEEHINKREKMEVNAEGNEQDFIDVVLSKMSNEYLGEGYSRDTVIKATVFSLVLDAADTVALHINWGMALLINNQKALTKAQEEIDTKVGKDRWVEESDIKDLVYLQAIVKEVLRLYPPGPLLVPHENVEDCVVSGYHIPKGTRLFANVMKLQRDPKLWSDPDTFDPERFIATDIDFRGQYYKYIPFGSGRRSCPGMTYALQVEHLTMAHLIQGFNYRTPNDEPSDMKEGAGITIRKVNPVELIIAPRLAPELY

SEQ ID NO: 309 - DNA, 393 bp, Nicotiana tabacum
gtttttcccatagaagcctttgtaggactagtaaccttcacatttctctcatacttcctatggacaaaaaaatctcaaaaacttccaaaacccttaccaccgaaaatccccggaggatggccggtaatcggccatctttttcacttcaataacgacggcgacgaccgtccattagctcgaaaactcggagacttagctgataaatacggccccgttttcacttttcggctaggtcttccccttgtgctagttgtaagcagttacgaagctataaaagattgcttctctacaaatgacgccattttctccaatcgtccagcttttctttacggcgaataccttggctacaataatacaatgctttttctagcaaattacggaccttactggcga

SEQ ID NO: 310 - DNA, 479 bp, Nicotiana tabacum
tagtatacctccaagctattgttaaaaaggtgttacgattatatccaccaggacctttgttagtaccacatgaaaatgtaaaggattgtgttgttagtggatatcacattcctaaagggactagattattcgcaaacgtcatgaaactgcagcgcgatcctaaattcttgtcaaatcctgataagttcgatccagagagattcatcgctggtgatattgacttccgtggtcaccactatgagtttatcccatttggttctggaagacgatcttgtccggggatgacttatgcatcgcaagtggaacacctaacaatggcacatttagtccagggtttcaattacaaaactccaaatgacgaggccttggatatgaaggaaggtgcaggcataacaatacgtaaggtaaatccagtggaattgatagtaacgcctcgcttggcacctgagctttactaaacctaagatctttcatcttgg

SEQ ID NO: 311 - protein, 151 aa, Nicotiana tabacum
VYLQAIVKKVLRLYPPGPLLVPHENVKDCVVSGYHIPKGTRLFANVMKLQRDPKFLSNPDKFDPERFIAGDIDFRGHHYEFIPFGSGRRSCPGMTYASQVEHLTMAHLVQGFNYKTPNDEALDMKEGAGITIRKVNPVELIVTPRLAPELY

SEQ ID NO: 312 - DNA, 512 bp, Nicotiana tabacum
ggatagatgggtagaagagagtgatattaaggatttggtgtacctccaagctattgtcaaagaagtgttacgattgtatccaccaggacctttgttagtaccacatgaaaatgtggaggattgtgttgttagtggatatcacattcctaaagggactagactatttgcgaatgtcatgaaactgtaacgcgatcctaaactctggccaaatcctgataatttcgatccagagagattcatcgctgcagatattgacttccgtggtcagcactatgagtatatcccgtttggttctggaagacgatcttgtccggggatgacttatgcattgcaagcggaacatctaacaatggcacatttgatccaaggtttcaattacaggactccaactaacgagcccttggatatgaaggaaggtgcaggcataactatacgtaaggtaaatcctgtggaagtgctaattaagcctcgcctggcacccgagctttattaaaacctaagatcatcttgct

SEQ ID NO: 313 - protein, 162 aa, Nicotiana tabacum
DRWVEESDIKDLVYLQAIVKEVLRLYPPGPLLVPHENVEDCVVSGYHIPKGTRLFANVMKLRDPKLWPNPDNFDPERFIAADIDFRGQHYEYIPFGSGRRSCPGMTYALQAEHLTMAHLIQGFNYRTPTNEPLDMKEGAGITIRKVNPVEVLIKPRLAPELY

SEQ ID NO: 314 - DNA, 503 bp, Nicotiana tabacum
aggatagatgggtagaagagagtgatattaaggatttggtgtacctccaagctattgtcaaagaagtgttacgattgtatccaccaggacctttgttagtaccacatgaaaatgtagaggattgtgttgttagtggatatcacattcctaaagggactagactatttgcgaatgtcatgaaactgcaacgcgatcctaaactctggccaaatcctgataatttcgatccagagagattcgtcgctgcagatattgacttccgtggtcagcactatgagtatatcccgtttggttctggaagacgatcttgtccgggggtgacttatgcattgcaagtggaacatcacatttgatccaaggtttcaattacaggactccaactaacgagcccttggatatgaaggaaggtgcacgcataactatacgtaaggtaaatcctgtggaagtgctaattaagcctagcctggcacctgagctttattaaaacctaagatcatcttgct

SEQ ID NO: 315 - protein, 68 aa, Nicotiana tabacum
VYPVWFWKTILSGGDLCIASGTSHLIQGFNYRTPTNEPLDMKEGARITIRKVNPVEVLIKPSLAPELY

SEQ ID NO: 316 - DNA, 410 bp, Nicotiana tabacum
ctgaaatagagggagtataatattcatttcaagagatcactataaaaaggaagttcgtgatagtttgattctcaagttcttatctaaaaatccataatggtttttcccatagaagccattgtaggactagtaaccttcacatttctcttatacttcctatggacaaaaaaatctcaaaaacctccaaaacccttaccaccgaaaatccccggaggatggccggtaatcggccatcttttctacttcgataacgaaggcgacgaccgtccattagctcggagacttagctgataaatacggccccgttttcacttttcggctaggtcttccccttgtgctagttgtaagcagttatgaagctataaaagattgcttctctacaaatgacgccattttctccaatcgtccag

SEQ ID NO: 317 - protein, 60 aa, Nicotiana tabacum
MVFPIEAIVGLVTFTFLLYFLWTKKSQKPPKPLPPKIPGGWPVIGHLFYFDNEGDDRPLA

SEQ ID NO: 318 - DNA, 421 bp, Nicotiana tabacum
ggacctttgttagtaccacatgaaaatgtaaaggattgtgttgttagtggatatcacattcctaaagggactagattattcgcaaacgtcatgaaactgcagcgcgatcctaaattcttgtcaaatcctgataagttcgatccagagagattcatcgctggtgatattgacttccgtggtcaccactatgagtttatcccatttggtcctggaagacgatcttgtccggggatgacttatgcattgcaagtggaacacctaacaatggcacatttaatccagggtttcaattacaaaactccaaatgacgagcccttggatatgaaggaaggtgcaggcataactatacgtaaggtaaatcctgtggaactgataatagcgcctcgcctggcacctgagctttattaaaacctaagatcat

SEQ ID NO: 319 - protein, 135 aa, Nicotiana tabacum
GPLLVPHENVKDCVVSGYHIPKGTRLFANVMKLQRDPKFLSNPDKFDPERFIAGDIDFRGHHYEFIPFGPGRRSCPGMTYALQVEHLTMAHLIQGFNYKTPNDEPLDMKEGAGITIRKVNPVELIIAPRLAPELY

SEQ ID NO: 320 - DNA, 577 bp, Nicotiana tabacum
atgacattattgataaacaatcaaaatgccttgatgaaagcacaagaagagatagacacaaaagttggtaaggatagatgggtagaagagagtgatattaaggatttagtatacctccaagctattgttaaaaaggtgttacgattatatccaccaggacctttgttagtaccacatgaaaatgtaaaggattgtgttgttagtggatatcacattcctaaagggactagattattcgcaaacgtcatgaaactgcagcgcgatcctaaactcttgtcaaatcctgataagttcgatccagagagattcatcgctggtgatattgacttccgtggtcaccactatgagtttatcccatttggttctggaagacgatcttgtccggggatgacttatgcattgcaagtggaacacctaacaatggcacatttaatccagggtttcaattacaagactccaaatggcgaggccttggatatgaaggaaggtgcaggcataacaatacgtaaggtaaatccagtggaattgataatagcgcctcgcctggcacctgagctttattaatacctaagatcat

SEQ ID NO: 321 - protein, 187 aa, Nicotiana tabacum
MTLLINNQNALMKAQEEIDTKVGKDRWVEESDIKDLVYLQAIVKKVLRLYPPGPLLVPHENVKDCVVSGYHIPKGTRLFANVMKLQRDPKLLSNPDKFDPERFIAGDIDFRGHHYEFIPFGSGRRSCPGMTYALQVEHLTMAHLIQGFNYKTPNGEALDMKEGAGITIRKVNPVELIIAPRLAPELY

SEQ ID NO: 322 - DNA, 381 bp, Nicotiana tabacum
ggatatcacattcctaaagggactagattattcgcaaacgtcatgaaactgcagcgcgatcctaaactcttgtcaaatcctgataagttcgatccagagagattcatcgctggtgatattgacttccgtggtcaccactatgagtttatcccatttggttctggaagacgatcttgtccggggatgacttatgcattgcaagtggaacacctaacaatggcacatttaatccagggtttcaattacaaaactccaaatgacgaggccttggatatgaaggaaggtgcaggcataacaatacgtaaggtaaatccagtggaattgataataacgcctcgcttggcacctgagctttattaaaacctaagatcatcttgcttg

SEQ ID NO: 323 - protein, 119 aa, Nicotiana tabacum
GYHIPKGTRLFANVMKLQRDPKLLSNPDKFDPERFIAGDIDFRGHHYEFIPFGSGRRSCPGMTYALQVEHLTMAHLIQGFNYKTPNDEALDMKEGAGITIRKVNPVELIITPRLAPELY

SEQ ID NO: 324 - DNA, 444 bp, Nicotiana tabacum
cgattatatccaccgggacctttattagtaccccatgaaaatgtagaggattgtgttgttagtggatatcacattcctaaagggactagactattcgcgaacgttatgaaattacagcgcgatcctaaactctggtcaaatcctgataagttcgatccagagagatttttcgctgctgatattgactttcgtggtcaacactatgagtttatcccatttggttctggaagacgatcttgtccggggatgacttatgctatgcaagtggaacacctaacaatcgcacacttgatccagggtttcaattacaaaactccaaatgacgagcccttggatatgaaggaaggtgcaggattaactatacgtaaggtaaatcctatagaagtggtaattacgcctcgcctgacacctgagctttattaaaacctaagatcatcttgcttg

SEQ ID NO: 325 - protein, 140 aa, Nicotiana tabacum
RLYPPGPLLVPHENVEDCVVSGYHIPKGTRLFANVMKLQRDPKLWSNPDKFDPERFFAADIDFRGQHYEFIPFGSGRRSCPGMTYAMQVEHLTIAHLIQGFNYKTPNDEPLDMKEGAGLTIRKVNPIEVVITPRLTPELY

SEQ ID NO: 326 - DNA, 379 bp, Nicotiana tabacum
atatcacattcctaaagggactagattattcgcaaacgtcatgaaactgcagcgcgatcctaaactcttgtcaaatcctgataagttcgatccagagagattcatcgctggtgatattgacttccgtggtcaccactatgagtttatcccatttggttctggaagacgatcttgtccggggatgacttatgcattgcaagtggaacacctaacaatggcacatttaatccagggtttcaattacaaaactccaaatgacgaggccttggatatgaaggaaggtgcaggcataacaatacgtaaggtaaatccagtggaattgataataacgcctcgcttggcacctgagctttattaaaacctaagatcatcttgcttg

SEQ ID NO: 327 - protein, 118 aa, Nicotiana tabacum
YHIPKGTRLFANVMKLQRDPKLLSNPDKFDPERFIAGDIDFRGHHYEFIPFGSGRRSCPGMTYALQVEHLTMAHLIQGFNYKTPNDEALDMKEGAGITIRKVNPVELIITPRLAPELY

SEQ ID NO: 328 - DNA, 440 bp, Nicotiana tabacum
gtgatactgtcataaaagcaacagtgtttagtttagtcttggatgctgcggacacagttgctcttcacatgaattggggaatggcattattgataaacaatcaacatgccttgaagaaagcgcaagaagagatagataaaaaagttggtaaggatagatgggtagaagagagtgatattaaggatttggtatacctccaaactattgttaaagaagtgttacgattatatccaccgggacctttattagtaccccatgaaaatgtagaggattgtgttgttagtggatatcacattcctaaagggactagactattcgcgaacgttatgaaattacagcgcgatcctaaactctggtcaaatcctgataagttcgatccagagagatttttcgctgctgatattgactttcgtggtcaacactatgagtttatcccattt

SEQ ID NO: 329 - protein, 146 aa, Nicotiana tabacum
DTVIKATVFSLVLDAADTVALHMNWGMALLINNQHALKKAQEEIDKKVGKDRWVEESDIKDLVYLQTIVKEVLRLYPPGPLLVPHENVEDCVVSGYHIPKGTRLFANVMKLQRDPKLWSNPDKFDPERFFAADIDFRGQHYEFIPF

SEQ ID NO: 330 - DNA, 386 bp, Nicotiana tabacum
ataatgctttctcccatagaagccattgtaggagcagtaaccctaattacatttctcttatacttcctatgtacaaaagaatctcaaaaacattcaaagcccttaccaacgaaaatccccggaggatggccggtaatcggccatcttttccacttcaataacgacggcgacgaccgtccattagctcgaaaactcggagacttagctgataaatacggccccgttttcacttttcggctaggtcttccccttgtgctagttgtaagcagttacgaagctttaaaagattgcttctctacaaatgacgccattttctccaatcgtccagcttttctttacggcgaataccttggctacaataatacaatgctttttctagcaaatta

SEQ ID NO: 331 - protein, 127 aa, Nicotiana tabacum
MLSPIEAIVGAVTLITFLLYFLCTKESQKHSKPLPTKIPGGWPVIGHLFHFNNDGDDRPLARKLGDLADKYGPVFTFRLGLPLVLVVSSYEALKDCFSTNDAIFSNRPAFLYGEYLGYNNTMLFLAN

SEQ ID NO: 332 - DNA, 552 bp, Nicotiana tabacum
agaaagcacaagaagagatagacacaaaagttggcaaggatagatgggtagaagagagtgatattaaggatttggtgtacctccaagctattgttaaagaagtgttacgattatatccaccgggacctttgttagtaccacatgaaaatatagaggattgtgttgttagtggatattacatttctaaagggactagactattcgcaaatgttatgaaactgcagcgcgatcctaaactctggccaaatcctgataatttcgatccagagagatttgtcgctgcaggtattgactttcgtggtcagcattatgagtatatcccgtttggttctggaagacgatcttgtccggggatgacttatgcattgcaagtggaacacttaacaatggcacatttgatccagggtttcaattacagcactccaaatgacgagcccttggatatgaaggaaggtgcaggtataactatacgtaaggtaaatcccgtggaagtgataattatgcctcgcctggcacctgagctttattaaaacctaagatctttcatcttgg

SEQ ID NO: 333 - protein, 175 aa, Nicotiana tabacum
KAQEEIDTKVGKDRWVEESDIKDLVYLQAIVKEVLRLYPPGPLLVPHENIEDCVVSGYYISKGTRLFANVMKLQRDPKLWPNPDNFDPERFVAAGIDFRGQHYEYIPFGSGRRSCPGMTYALQVEHLTMAHLIQGFNYSTPNDEPLDMKEGAGITIRKVNPVEVIIMPRLAPELY

SEQ ID NO: 334 - DNA, 609 bp, Nicotiana tabacum
ataatgctttctcccatagaagccattgtaggactagtaaccttcacatttctcttctacttcctatggacaaaaaaatctcaaaaaccttcaaaacccttaccaccgaaaatccccggaggatggccggtaattggccatcttttccacttcaatgacgacggcaacgaccgtccattagctcgaaaactcggagacttagctgacaaatacggccccgttttcacttttcggctaggccttccccttgtgttagttgtaagcagttacgaagctataaaagactgtttctctacaaatgatgccattttctctaatcgtccagcttttctttacggcgaataccttggctacaataatgccatgctatttttggcaaattacggaccttactggcgaaaaaatcgtaaattagttattcaggaagttctctcagctagtcgtctcaaaaaattcaaacacgtgagattcgccagaattcaaacgagcattaagaatttatacactcgaattgatagaaattcgagtacgataaatttaactgattggttagaagaattgaattttggtctcatcgtgaagatgatagctgggaaaaattatgattcc

SEQ ID NO: 335 - protein, 202 aa, Nicotiana tabacum
MLSPIEAIVGLVTFTFLFYFLWTKKSQKPSKPLPPKIPGGWPVIGHLFHFNDDGNDRPLARKLGDLADKYGPVFTFRLGLPLVLVVSSYEAIKDCFSTNDAIFSNRPAFLYGEYLGYNNAMLFLANYGPYWRKNRKLVIQEVLSASRLKKFKHVRFARIQTSIKNLYTRIDRNSSTINLTDWLEELNFGLIVKMIAGKNYDS

SEQ ID NO: 336 - DNA, 1277 bp, Nicotiana tabacum
ttgatttacatgtttggtcaagaacataaagaccatcgccgtcgaatggcccctaattttacccctaaagctcttgctacttacactgttatccaacaaaagattattatcaaacactttcagtcctggttggacgaagcatcccaatcccctaacaaaccaatcacacttcgcctcctttgccgcgatatgaacttggatacttcccagactgtcttcgttggtccatacttaaacgaagattccagaaagcagttcaatgttgactacaattacttcaatgttgggttaatgaaactccctgttgatttacctggtttcgccttcagagatgctaggttagctgttgggagactagtcgacacgctttccgtttgtgcagcacagagccaaattaagatgcgaggtgacgaagaacccacttgcttgattgatttttggatgcaggagaatttcagagagattcaggaagctaagattaatggttcacaaaagccgtttgagtataccagtaagcaacttggtggcttcttatttgacttcctctttgcggctcaagatgcttctacttcatctctgttatgggcaatggtgcttttggaatctcacccgcaagttctggagagagtccgagccgaagtggcgaaattctggtcgccagaatctgaggagcagccgttgacggcggagatgcttagggaaatgaagtacctggaggcggtggcgcgtgaggttgttaggatcagaactccggcggctttggtgccgcacattgccggcgaagaattccggttaactgatgattatgttattccaaaggggactattgttttcccttcggtttttgactcgtctttccaggggtttcctgaaccggagaagtttgacccggaccggttcacagaggagaggcaagaggaacgggtttacaagaagaattatctagcatttggagctgggccccatggatgtgtgggacagaggtatgctataaaccatttgatgctctttattgcgttgttcacggctctgattgatttcaagaggcacaaaacggacggctgtgatgatatcgcgtatattccaaccattgctccaaaggatgattgtaaagtgttcctttcacagaggtgcactcgattcccatctttttcatgaactaattgcaccttttatttaattctgatcctcaaattggtcccattggaccatggatgtaataggaccaattgcaagaatggggtccaatgtatttgttctttccatttatttttttt

SEQ ID NO: 337 - protein, 385 aa, Nicotiana tabacum
LIYMFGQEHKDHRRRMAPNFTPKALATYTVIQQKIIIKHFQSWLDEASQSPNKPITLRLLCRDMNLDTSQTVFVGPYLNEDSRKQFNVDYNYFNVGLMKLPVDLPGFAFRDARLAVGRLVDTLSVCAAQSQIKMRGDEEPTCLIDFWMQENFREIQEAKINGSQKPFEYTSKQLGGFLFDFLFAAQDASTSSLLWAMVLLESHPQVLERVRAEVAKFWSPESEEQPLTAEMLREMKYLEAVAREVVRIRTPAALVPHIAGEEFRLTDDYVIPKGTIVFPSVFDSSFQGFPEPEKFDPDRFTEERQEERVYKKNYLAFGAGPHGCVGQRYAINHLMLFIALFTALIDFKRHKTDGCDDIAYIPTIAPKDDCKVFLSQRCTRFPSFS

SEQ ID NO: 338 - DNA, 1204 bp, Nicotiana tabacum
tcattttcagtatgctatgttttgtctacttgtgttgatgtgtttcggggataagctcgacgaggctcaaatcaaacaaattgaaggtgttcagcgcaggttgctcctgggtttccgacgattcaatatactcaatttcttacccagagttgggaaaataatctttaggaatcgctggaaggaactaattgaactacgtcaagagcaagagaagatcttcattcctttgattgaagctcgaagtattagggccaaagaacaaaagcctgaggaagaagtggtggcttatgtggatacgctgttgaatttggaattgccaggggaaaacaggagcctcaattatggggaaatggttagcctctgcagtgaattcctaaacgccggaactgatacgacgtccaccgccttacagtgggttatggccaacttggtcaaaaacccttccattcagggaaaactatatcaagaaattgctagtgtagtgggagagaaacagagcaagttgacagaagaggtggtaaaggaggacgatctgcataaaatgccatacttgagagcagtgatctttcttaggcgacacccgcctggtcactttgtgctgccacatacggtgacagaggaagtagaactgaatggctatgttgtcccgaagaatgccaccatcaatttcatggttgcagacatgggtttggacccaaaggtgtgggaggatcccttggaattcaagccagagaggttcttaatggagggatcagataaggaagggttcgatataacaggaagtagagagatcaagatgatgccatttggcgctggtaggagaatttgcccaggctatgctttggctatgcttcatctagagtactttgtggctaatttggtttggcattttcgatgggaggctgtggagggagatgatgttgatctttcagaaaagctagaattcaccgttgtgatgaagaatccacttcgagctcgtatctgcctcagagttaactctatttgaatttggtaattactagttctttctatttgcattgttccctgttgatggacttcccccatatagtactggaagttagagggagaatgattattaatgccttgctgcaatattagcttagtagttagtagtgaatataattgaaactggatatttctatcttatgtgttgtacatttggttcattgcaaagggcgaattc

SEQ ID NO: 339 - protein, 334 aa, Nicotiana tabacum
HFQYAMFCLLVLMCFGDKLDEAQIKQIEGVQRRLLLGFRRFNILNFLPRVGKIIFRNRWKELIELRQEQEKIFIPLIEARSIRAKEQKPEEEVVAYVDTLLNLELPGENRSLNYGEMVSLCSEFLNAGTDTTSTALQWVMANLVKNPSIQGKLYQEIASVVGEKQSKLTEEVVKEDDLHKMPYLRAVIFLRRHPPGHFVLPHTVTEEVELNGYVVPKNATINFMVADMGLDPKVWEDPLEFKPERFLMEGSDKEGFDITGSREIKMMPFGAGRRICPGYALAMLHLEYFVANLVWHFRWEAVEGDDVDLSEKLEFTVVMKNPLRARICLRVNSI

SEQ ID NO: 340 - DNA, 1066 bp, Nicotiana tabacum
ataaatctaactgattggttagaagaattgaattttggtctgatcgtgaaaatgatcgctgggaaaaattatgaatccggtaaaggagatgaacaagtggaaagatttaagaatgcgtttaaggatttcatggttttatcaatggaatttgtattatgggatgcatttccaattccattatttaaatgggtggattttcaaggtcatattaaggcaatgaaaaggacatttaaggatatagattctgtttttcagaactggttagaggaacatattaataaaagagaaaaaatggaggttaatgcagaagggaatgaacaagatttcattgatgtggtgctttcaaaaatgagtaatgaatatcttggtgaaggttactctcgtgatactgtcattaaagcaacggtgtttagtttggtcttggatgcagcagacacagttgctcttcacataaattggggaatggcattattgataaacaatcaaaaggccttgacgaaagcacaagaagagatagacacaaaagttggtaaggacagatgggtagaagagagtgatattaaggatttggtatacctccaagctattgttaaagaagtgttacgattatatccaccaggacctttgttagtaccacacgaaaatgtagaagattgtgttgttagtggatatcacattcctaaagggacaagattattcgcaaacgtcatgaaactgcaacgtgatcctaaactctggtctgatcctgatactttcgatccagagagattcattgctactgatattgactttcgtggtcagtactataagtatatcccgtttggttctggaagacgatcttgtccagggatgacttatgcattgcaagtggaacacttaacaatggcacatttgatccaaggtttcaattacagaactccaaatgacgagcccttggatatgaaggaaggtgcaggcataactatacgtaaggtaaatcctgtggaactgataataacgcctcgcctggcacctgagctttattaaaacctaagatgtttcatcttggttgatcattgtttaatac

SEQ ID NO: 341 - protein, 341 aa, Nicotiana tabacum
INLTDWLEELNFGLIVKMIAGKNYESGKGDEQVERFKNAFKDFMVLSMEFVLWDAFPIPLFKWVDFQGHIKAMKRTFKDIDSVFQNWLEEHINKREKMEVNAEGNEQDFIDVVLSKMSNEYLGEGYSRDTVIKATVFSLVLDAADTVALHINWGMALLINNQKALTKAQEEIDTKVGKDRWVEESDIKDLVYLQAIVKEVLRLYPPGPLLVPHENVEDCVVSGYHIPKGTRLFANVMKLQRDPKLWSDPDTFDPERFIATDIDFRGQYYKYIPFGSGRRSCPGMTYALQVEHLTMAHLIQGFNYRTPNDEPLDMKEGAGITIRKVNPVELIITPRLAPELY

SEQ ID NO: 342 - DNA, 994 bp, Nicotiana tabacum
atgagaatggtagctggaaagagatattatggtgaagaggtagataacgaggaggcaaaccattttcgggagcttgtagaagaggttatttcatatgggggtgcatcaaatcccacggatttcatgcctgcaatatttcgttgctttttcaggagtatggagaagaatttggccaggcttggtagcaaaatggacgcgctcttgcaaggcttgattgatgaacaccgtcgtgataaaagcagaaattccatgattgatcatttgctttctctgcaagaatcagaaccagaatattactctgatcaaatcatcaaaggaataatattggtcatgctgaatgcggggactgaaacatcatctgtaacaatagaatgggcaatgtctcttttactcaatcatccagaggtgttggaaaaggccaaagctgaaatagacgaccatgtgggtaaagatcgtttagtggatgaagcagatttacccaagctgaaataccttcaaagtattatttcagagacacttcgattgtaccctgcaggaccaatgctagtgcctcatggatcatctgatgattgcactatcgctgggttgcacattccacgtggcacgatgctattggtgaatgcttgggccatccacagggacccattactttgggaggatccagagagcttcaagccagaaaggtttgaaggtgtgcaagtggaatcatggaagctattgccatttggaatgggaaggagagcgtgtccaggttctggacttgctcaacgtgtggttggtttagctttagcatctctagtgcagtgttttgagtggaaaagggtaagtgaagaggtggttgatttgactgaaggaaaaggtctcaccatgccaaaagctgagccactcatggctaggtgcgaagctcgtgatattcttcacaaagttgtttcagaaatatcctaacgtttcagagtgtttcttgcatttttttagtgctccatacctctagttt

SEQ ID NO: 343 - protein, 314 aa, Nicotiana tabacum
MRMVAGKRYYGEEVDNEEANHFRELVEEVISYGGASNPTDFMPAIFRCFFRSMEKNLARLGSKMDALLQGLIDEHRRDKSRNSMIDHLLSLQESEPEYYSDQIIKGIILVMLNAGTETSSVTIEWAMSLLLNHPEVLEKAKAEIDDHVGKDRLVDEADLPKLKYLQSIISETLRLYPAGPMLVPHGSSDDCTIAGLHIPRGTMLLVNAWAIHRDPLLWEDPESFKPERFEGVQVESWKLLPFGMGRRACPGSGLAQRVVGLALASLVQCFEWKRVSEEVVDLTEGKGLTMPKAEPLMARCEARDILHKVVSEIS

SEQ ID NO: 344 - DNA, 1030 bp, Nicotiana tabacum
ctcctttgccgcgatatgaacttggatacttcccagactgtcttcgttggtccatacttaaacgaagattccagaaagcagttcaatgttgactacaattacttcaatgttgggttaatgaaactccctgttgatttacctggtttcgccttcagagatgctaggttagctgttgggagactagtcgacacgctttccgtttgtgcagcacagagccaaattaagatgcgaggtgacgaagaacccacttgcttgattgatttttggatgcaggagaatttcagagagattcaggaagctaagattaatggttcacaaaagccgtttgagtataccagtaagcaacttggtggcttcttatttgacttcctctttgcggctcaagatgcttctacttcatctctgttatgggcaatggtgcttttggaatctcacccgcaagttctggagagagtccgagccgaagtggcgaaattctggtcgccagaatctgagcagccgttgacggcggagatgcttagggaaatgaagtacctggaggcggtggcgcgtgaggttgttaggatcagaactccggcgactttggtgccgcacattgccggcgaagaattccggttaactgatgattatgttattccaaaggggactattgttttcccttcggtttttgactcgtctttccaggggtttcctgaaccggagaagtttgacccggaccggttcacagaggagaggcaagaggaacgggtttacaagaagaattatctagcatttggagctgggccccatggatgtgtgggacagaggtatgctataaaccatttgatgctctttattgcgttgttcacggctctgattgatttcaagaggcacaaaacggacggctgtgatgatatcgcgtatattccaaccattgctccaaaggatgattgtaaagtgttcctttcacagaggtgcactcgattcccatctttttcatgaactaattgcgccttttatttaattctgatcctcaaattggtcccattgg

SEQ ID NO: 345 - protein, 326 aa, Nicotiana tabacum
LLCRDMNLDTSQTVFVGPYLNEDSRKQFNVDYNYFNVGLMKLPVDLPGFAFRDARLAVGRLVDTLSVCAAQSQIKMRGDEEPTCLIDFWMQENFREIQEAKINGSQKPFEYTSKQLGGFLFDFLFAAQDASTSSLLWAMVLLESHPQVLERVRAEVAKFWSPESEQPLTAEMLREMKYLEAVAREVVRIRTPATLVPHIAGEEFRLTDDYVIPKGTIVFPSVFDSSFQGFPEPEKFDPDRFTEERQEERVYKKNYLAFGAGPHGCVGQRYAINHLMLFIALFTALIDFKRHKTDGCDDIAYIPTIAPKDDCKVFLSQRCTRFPSFS

SEQ ID NO: 346 - DNA, 593 bp, Nicotiana tabacum
  misc_feature (80)..(80): n is a, c, g, or t
gatcgtttagtggatgaagcagatttacccaagctgaaataccttcaaagtattatttcagagacacttcgattgtaccntgcagcaccaatgctagtgcctcatgaatcatctgatgattgcacggtcgctggcttccacattcctcgtggcacgatgctattggtgaatgcttgggccatccacagggaccccttactttgggaggacccagagagcttcaagccaaaaaggtttgaaggtgtgcaagccgaatcatggaagctattgccatttggaatgggaaggagagcgtgcccaggttctggacttgctcaatgtgtggttggtttagctttagcaactctagtgcagtgttttgagtggaaaagggtaagcgaagaggtggttgatttgacggaaggaaaaggtctcactatgccaaaacccgagccactcatggctaggtgcgaagctcgtgacatttttcacaaagttctttcagaaatatcttaatgttttgggagtctgaattaataatgtaaaatgtattttcattttctcatataatattgcactatctacatttctgatatgtcattgagatactccgg

SEQ ID NO: 347 - protein, 164 aa, Nicotiana tabacum
  misc_feature (27)..(27): Xaa can be any naturally occurring amino acid
DRLVDEADLPKLKYLQSIISETLRLYXAAPMLVPHESSDDCTVAGFHIPRGTMLLVNAWAIHRDPLLWEDPESFKPKRFEGVQAESWKLLPFGMGRRACPGSGLAQCVVGLALATLVQCFEWKRVSEEVVDLTEGKGLTMPKPEPLMARCEARDIFHKVLSEIS

SEQ ID NO: 348 - DNA, 571 bp, Nicotiana tabacum
gaggacgatctgcataaaatgccatacttgagagcagtgatcttagagggtcttaggcgacacccgcctggtcactttgtgctgccacatacggtgacagaggaagtagaactgaatggctatgttgtcccgaagaatgccaccatcaatttcatggttgcagacatgggtttggacccaaaggtgtgggaggatcccttggaattcaagccagagaggttcttaatggagggatcagataaggaagggttcgatataacaggaagtagagagatcaagatgatgccatttggcgctggtaggagaatttgcccaggctatgctttggctatgcttcatctagagtactttgtggctaatttggtttggcattttcgatgggaggctgtggagggagatgatgttgatctttcagaaaagctagaattcaccgttgtgatgaagaatccacttcgagctcgtatctgcctcagagttaactctatttgaatttggtaattactagttctttctatttgcattgttccctgttgatggacttcccccatatagtactggaagttagagggag

SEQ ID NO: 349 - protein, 162 aa, Nicotiana tabacum
EDDLHKMPYLRAVILEGLRRHPPGHFVLPHTVTEEVELNGYVVPKNATINFMVADMGLDPKVWEDPLEFKPERFLMEGSDKEGFDITGSREIKMMPFGAGRRICPGYALAMLHLEYFVANLVWHFRWEAVEGDDVDLSEKLEFTVVMKNPLRARICLRVNSI

SEQ ID NO: 350 - DNA, 1294 bp, Nicotiana tabacum
gcagtgctgacttggcgtacgaagctttaattgaaaagggtcaaattttcgctacccgcccgagtgagaccccgacccgaaccattttcagttgcaacaagttcagtgtcaatgcagcaatttacgggccactttggcgatccctgagaagaaatatggtccaaaatatgcttagttcgagtagagtgaaagaatttcgtgattgtagagaaatggcaatggataagttgattgaaaggatacatgcagatgctaaggccaataacgatatcgtttgggtgctgaaaaacgcgcgtttcgcggtgttttatatacttttgactatgtgttttggtgttgaaatggatgagaaaatgattgaaaccgttgatcaaatgatgaaggatgtgctaatggagcttcatccaagaatagatgattttcttcctatattgagcttgtttgttggttataaacaacgtaagagagttcacgaagttcgcaagagacaaatagaaacacttgtccctttgatcgagaaacgtcgaagagcaatacaaaatcctgggtacgataagacagttgcctcgttttcgtacttagatactttatttgatgttaaggtcgaaggtacaaagtcaggaccaacgaatccggagcttgtaacactatgttcagagttcttgaatggtgggaccgacacaaccgctaccgcaatagagtgggccatagggagaatgatcgaaaatccaagcatacagaagagaatatacgaagagattagaaatacagtgggtgacagaaagattgacgaaaaggatatggataagatgccttatttaaacgccgttgtaaaggagcttttacgtaaacatcctcctacgtacgttacatttacccatgcagtaacggagccaacaacattgggtgggtatgacatacccacatatgctaatgtagagttttttgtacccgggatctcggatgacccgaaagtttggtctgatccggaaaagtttgacccggataggtttctatccgggcgggaggacgctgatataacgggtgtgaccggggtaaagatgatgccatttggggtcgggcggaggatttgtccgggcttgggcttggcaacggtgcatgtgaatttgatgttggcccgaatgattcaagaatttgaatggtccgcttacccggaaaataggaaagtggattttactgagaaattggaatttactgtggtgatgaaaaaccctttaagagctaaggtcaagccaagaatgcaagtggtgtaattcattaagattataagtcc

SEQ ID NO: 351 - protein, 423 aa, Nicotiana tabacum
SADLAYEALIEKGQIFATRPSETPTRTIFSCNKFSVNAAIYGPLWRSLRRNMVQNMLSSSRVKEFRDCREMAMDKLIERIHADAKANNDIVWVLKNARFAVFYILLTMCFGVEMDEKMIETVDQMMKDVLMELHPRIDDFLPILSLFVGYKQRKRVHEVRKRQIETLVPLIEKRRRAIQNPGYDKTVASFSYLDTLFDVKVEGTKSGPTNPELVTLCSEFLNGGTDTTATAIEWAIGRMIENPSIQKRIYEEIRNTVGDRKIDEKDMDKMPYLNAVVKELLRKHPPTYVTFTHAVTEPTTLGGYDIPTYANVEFFVPGISDDPKVWSDPEKFDPDRFLSGREDADITGVTGVKMMPFGVGRRICPGLGLATVHVNLMLARMIQEFEWSAYPENRKVDFTEKLEFTVVMKNPLRAKVKPRMQVV

SEQ ID NO: 352 - DNA, 1825 bp, Nicotiana tabacum
acagcatcttgtgctgccataataattactctagtggtgtgtatatggagagtgctgaattgggtttggttcagaccaaagaagctggaaaagctactgaggaaacaaggtctcaaaggcaattcctacaggattttgtatggggatatgaaggagctttctggtatgattaaggaagctaactccaaacccatgaatctttctgatgatattgccccaagattggtccctttctttcttgataccatcaagaaatatgggaaaaaatcctttgtatggttgggtccaaaaccgctggtttttgtcatggaccccgagcttataaaggaagtattctccaaaaactatctgtatcaaaagcctcattcaaatccattaaccaagttactggcacaaggacttgtaagccaagaggaagacaaatgggccaaacatagaaaaatcgtcactcctgccttccacctggagaagctaaaggtttgtaattgcaatggattctccgtaagcagttcatttttatcttttctttcatcgtaacagaaacttactcttgattgtgattcttttttgaggtacttgtttggaaccattttgtattcctaattacaaagtcggaacattttgaataagtgtcccttcattgactttctcttaaccatttcttaaacagcatatgcttccagctttttgtttgagctgtactgagatgctgagcaaatgggaagacattgttgcagttgagggctcacatgagatagatatatggcctggccttcaacaattaactagtgatgtgatctctcggacagcctttggcagtagctatgaagcaggtagaaggatatttgaacttcaaaaggaacaagctcaatttcttatggaagctatacgctccgtttatattccaggctggaggtttttgccaacaaagaggaacagaagaatgaaggaaattgaaaaggatgttcaagccttagttaaaggtattattgataaaagagtaaagtcaatgaaagcaggagaggtgaataatgaggatctgcttggtatattgctggaatctaattttaaagaaattgaacagcatggaaacaaggattttggaatgagcattgaagaagtcattcaagaatgcaagttattctattttgctggccaagaaactacatcagtgttgcttgtatggactctaatattgctgagcaggcatcaggattggcaagcactggccagagaagaggtgttgcaagtctttgggaatcagaaaccagattttgatggattaaatcgtctaaaaattgttacaatgatcttgtacgagtctttaaggctctatcccccagtagtgacacttacccgaaggcctaaggaagacactgtattaggagatgtatctctaccagcaggtgtgttaatctccttaccagtgatcttattgcatcacgacgaagagatatggggtaaagatgcaaagaagttcaagccagagagattcagagatggagtctcaagtgcaacaaagggtcaagtcacttttttcccatttacttggggtcccagaatatgcattggacaaaattttgccatgttagaagcaaagactactttggctatgatcctacaacgcttctcctttgaactgtctccatcttatgcacatgctcctcagtccataataactttgcaaccccagtatggtgctccacttattttgcataaaatatagtttattacttgtaagtagtgtctcgttttatgttaagcatgagtccaaaatgttaaggcttgtagaactgcaaaatgggaatgaatcactagtgaattc

SEQ ID NO: 353 - protein, 353 aa, Nicotiana tabacum
KQHMLPAFCLSCTEMLSKWEDIVAVEGSHEIDIWPGLQQLTSDVISRTAFGSSYEAGRRIFELQKEQAQFLMEAIRSVYIPGWRFLPTKRNRRMKEIEKDVQALVKGIIDKRVKSMKAGEVNNEDLLGILLESNFKEIEQHGNKDFGMSIEEVIQECKLFYFAGQETTSVLLVWTLILLSRHQDWQALAREEVLQVFGNQKPDFDGLNRLKIVTMILYESLRLYPPVVTLTRRPKEDTVLGDVSLPAGVLISLPVILLHHDEEIWGKDAKKFKPERFRDGVSSATKGQVTFFPFTWGPRICIGQNFAMLEAKTTLAMILQRFSFELSPSYAHAPQSIITLQPQYGAPLILHKI

SEQ ID NO: 354 - DNA, 920 bp, Nicotiana tabacum
catcaacgagcacaagaaaaatcttgcagctggcaagagtaatggtgcattaggaggtgaagatctaattgatgtcctactaagacttaagaatgatacaagtcttcaatttcccatcaccaacaacagtatcaaagctgttattgttgacatgtttgctgccggaacggaaacttcatcaacaacaactgtatgggctatggctgaaatgatgaagaatccaagtgtattcaccaaagctcaagcagaagtgcgagaagcctttagggacaaagtatcttttgatgaaaacgatgtggaggagctgaaatacttaaagttagtcattaaagaaactttgagacttcatccaccctctccacttttggtcccaagagaatgcagggaagacacagatataaacggctacactattcctgcgaagaccaaagttatggttaatgtttgggcattgggaagagatccaaaatattgggatgacgccgaaagctttaagccagagagatttgagcaatgctctatggatttttttggtaataattttgagtttcttccctttggtggtggacggagaatttgtcctggaatgtcatttggtttagctaatctttacttgccattggcccaattgctgtatcacttcgactggaaactcccaactggaatcaagccaagagacttggacttgactgaattatctggaataactattgctagaaagggtgacctttacttaaatgccactccttatcaaccgtcgagactaatttaatattggcatcaactttttaaattttcttcatcaacctcattattaatgtacaataatctttcttctgttgttgtaggctttatcgatttccaatacatgtattctttatttaaaaatgtatcacattccatgtataaaaaaaaaaaaa

SEQ ID NO: 355 - protein, 256 aa, Nicotiana tabacum
INEHKKNLAAGKSNGALGGEDLIDVLLRLKNDTSLQFPITNNSIKAVIVDMFAAGTETSSTTTVWAMAEMMKNPSVFTKAQAEVREAFRDKVSFDENDVEELKYLKLVIKETLRLHPPSPLLVPRECREDTDINGYTIPAKTKVMVNVWALGRDPKYWDDAESFKPERFEQCSMDFFGNNFEFLPFGGGRRICPGMSFGLANLYLPLAQLLYHFDWKLPTGIKPRDLDLTELSGITIARKGDLYLNATPYQPSRLI

SEQ ID NO: 356 - DNA, 1394 bp, Nicotiana tabacum
aaataatggattatcatatttctttccattttcaagctcttttagggcttttagcctttgtgttcttgtctattatcttatggagaagaacactcacttcaagaaaattagcccctgaaatcccaggggcatggcctattataggccatcttcgtcagctgagtggtactgataagaatatcccatttccccgaatattgggcgctttggcagataaatatggacctgtcttcacactgagaatagggatgtacccctatttgattgtcaacaattgggaagcagctaaggattgtctcacaacgcatgataaggactccgctgcccgaccaacttctatggctggtgaaagcatcgggtacaagtatgcgaggtttacttatgctaattttggtccttattataaccaagtgcgcaaactagccctacaacatgtactctcgagtactaaactcgagaaaatgaaacacatacgtgtttctgaattggaaactagcatcaaagaattatattctttgacgctgggcaaaaacaacatgcaaaaagtgaatataagtaaatggtttgaacaattgactttaaacataatcgtgaagacaatttgtggcaagagatatagcaacatagaggaggatgaagaggcacaacgtttcagaaaggcatttaagggcatcatgtttgttgtagggcaaattgttttatatgacgcaattccattcccattgttcaaatactttgatttccaaggtcatatacaattgatgaacaaaatttataaagacttagattctattcttcaaggatggttggatgatcatatgatgaacaaggatgtaaacaataaggatcaagatgccatagatgccatgcttaaggtaacacaacttaatgaattcaaagcctatggtttttctcaggccactgtgatcaagtcgacagtcttgagtttgatcttagatggaaatgacacaaccgctgttcatttgatatgggtaatgtccttattactgaacaatccacatgttatgaaacaaggccaagaagagatagacatgaaagtgggtaaagagaggtggattgaagatactgacataaaaaatttagtgtaccttcaggctatcgttaaagagacattgcgcttgtatccacctgttccttttcttttaccacacgaagcagtgcaagattgtaaagtgactggttaccacattcctaaaggtactcgtctatatatcaatgcgtggaaagtacatcgcgatcctgaaatttggtcagagcccgaaaagtttatgcccaatagattcttgactagcaaagcaaatatagatgctcgcggtcaaaattttgaatttataccgtttggttctgggagacggtcatgtccagggataggt

SEQ ID NO: 357 - protein, 463 aa, Nicotiana tabacum
MDYHISFHFQALLGLLAFVFLSIILWRRTLTSRKLAPEIPGAWPIIGHLRQLSGTDKNIPFPRILGALADKYGPVFTLRIGMYPYLIVNNWEAAKDCLTTHDKDSAARPTSMAGESIGYKYARFTYANFGPYYNQVRKLALQHVLSSTKLEKMKHIRVSELETSIKELYSLTLGKNNMQKVNISKWFEQLTLNIIVKTICGKRYSNIEEDEEAQRFRKAFKGIMFVVGQIVLYDAIPFPLFKYFDFQGHIQLMNKIYKDLDSILQGWLDDHMMNKDVNNKDQDAIDAMLKVTQLNEFKAYGFSQATVIKSTVLSLILDGNDTTAVHLIWVMSLLLNNPHVMKQGQEEIDMKVGKERWIEDTDIKNLVYLQAIVKETLRLYPPVPFLLPHEAVQDCKVTGYHIPKGTRLYINAWKVHRDPEIWSEPEKFMPNRFLTSKANIDARGQNFEFIPFGSGRRSCPGIG

SEQ ID NO: 358 - DNA, 480 bp, Nicotiana tabacum
aataggccaaaatatatggaaggagatattgttgatcttttgctacaattgaagaaagaacaatcaacaccaattgatcttactttggaggatataaaaggaattctcatgaatgtgttggttgcaggatcagacactagtgcagctgctactgtttgggcaatgacagccttgataaaaaatccaaaaaccatgaaaaaagttcaatcagaaatcagaaaatcaatagggaagaaaggaattgtaaatgaagaagatgtccaaaacatgccttatctcaaagcagtgataaaggaaatatttagattgtatccaccagttccacttctagttccaagagaatcaatggaaaaaaccatattagaaggttatgaaattcggccaggaaccatagttcatgttaacgcttgggctattgcgagggatcctgaaatatgggaaaatccagaagaatttatacctgagagattacttgaatag

SEQ ID NO: 359 - protein, 159 aa, Nicotiana tabacum
NRPKYMEGDIVDLLLQLKKEQSTPIDLTLEDIKGILMNVLVAGSDTSAAATVWAMTALIKNPKTMKKVQSEIRKSIGKKGIVNEEDVQNMPYLKAVIKEIFRLYPPVPLLVPRESMEKTILEGYEIRPGTIVHVNAWAIARDPEIWENPEEFIPERLLE

SEQ ID NO: 360 - DNA, 736 bp, Nicotiana tabacum
gcaagttctttcactagttgtaatagtcctatacattcttcaacaattacacaacaaattcatgaaaaagaaaaagaaacttcctccaggtccaaaagggtttccaattattggaaatctatttatgattggcaaaaacctacatcaagatctttatcaaatagccaaaaaacatggtcctataatgagtatgagatttggtctagttcctatcattgttgcttcatctcctcatgctgctgaactattcttgaaaaaacatgatcttgtttttgctagtagaccatataatacagctgctcaatatattggatataatcaaagaaatcttacttttggtaaatatggtccttattggcgaaatatgcgaaaattatgtacgttagaattgcttagtagtctcaagatcaattcatttcaggccatgagaaaacaagaaattggaaattttgtgacttttctcaatagagcagcttctaatggtattgaggttgatattagtgctaaacttgcttcattaagtgcaaatatggcttgtttaatggtatttgggaagaaatatatggatgaagaatttgatgaaaggggttttaaagatgtaattcaagagacattagttataactgcaacaccaaatattggtgagttttttccttttcttgataggtttgatttgcagggatttgttccacgtatgaaaaaattggcaaagatttttgatgattttttcgagaaa

SEQ ID NO: 361 - protein, 245 aa, Nicotiana tabacum
QVLSLVVIVLYILQQLHNKFMKKKKKLPPGPKGFPIIGNLFMIGKNLHQDLYQIAKKHGPIMSMRFGLVPIIVASSPHAAELFLKKHDLVFASRPYNTAAQYIGYNQRNLTFGKYGPYWRNMRKLCTLELLSSLKINSFQAMRKQEIGNFVTFLNRAASNGIEVDISAKLASLSANMACLMVFGKKYMDEEFDERGFKDVIQETLVITATPNIGEFFPFLDRFDLQGFVPRMKKLAKIFDDFFEK

SEQ ID NO: 362 - DNA, 509 bp, Nicotiana tabacum
cgtgaatccattgaagattgtattgttgatggttttgatatacctaaaggttcaagaattttagtaaatacttgggcaattggaagagatccagaagcctggcccgaacccgagaagttcaagccagaaaggtttgttggtagcaacatcgatcttaggggacgtgattttcaacttttaccatttggctcagggagaaggagttgccccggattacaattagggctcaccattgttcgcttggtgttagcgcaattggttcattgctttgattgggaactaccaaatggtatggcgccagaagatttagatatgactgagaaatttggtttagttacagctagagctcaacatttagttgctattcctacttatcaattgcatgtgtagttgatgtgaatcttcctagaagcttaattaagtaaaaatgaagatctttgtcctctatatttttcattgtatgacaaaatttggtaacatttactacatatggagctaccactaaaaaa

SEQ ID NO: 363 - protein, 129 aa, Nicotiana tabacum
RESIEDCIVDGFDIPKGSRILVNTWAIGRDPEAWPEPEKFKPERFVGSNIDLRGRDFQLLPFGSGRRSCPGLQLGLTIVRLVLAQLVHCFDWELPNGMAPEDLDMTEKFGLVTARAQHLVAIPTYQLHV

SEQ ID NO: 364 - DNA, 532 bp, Nicotiana tabacum
tcgacgactataatttgggcattagctgaaatgatgaagaaaccaagtgttttagcaaaggcacaagctgaagtaaggcaagctttgaaggagaaaaaaggttttcaacagattgatcttgatgagctaaaatatctcaagttagtaatcaaagaaaccttaagaatgcaccctccaattcctctattagttcctagagaatgtatggaggatacaaagattgatggttacaatatacctttcaaaacaagagtcatagttaatgcatgggcaatcggacgagatccagaaagttgggatgaccccgaaagctttatgccagagagatttgagaatagttctattgactttcttggaaatcatcatcagtttataccatttggtgcaggaagaaggatttgtccgggaatgctatttggtttagctaatgttggacaacctttagctcagttactttatcacttcgattggaaactccctaatggacaaagtcatgagaatttcgacatgactgagtcacctggaatttctg

SEQ ID NO: 365 - protein, 177 aa, Nicotiana tabacum
STTIIWALAEMMKKPSVLAKAQAEVRQALKEKKGFQQIDLDELKYLKLVIKETLRMHPPIPLLVPRECMEDTKIDGYNIPFKTRVIVNAWAIGRDPESWDDPESFMPERFENSSIDFLGNHHQFIPFGAGRRICPGMLFGLANVGQPLAQLLYHFDWKLPNGQSHENFDMTESPGIS

SEQ ID NO: 366 - DNA, 1518 bp, Nicotiana tabacum
tgctctttctactctttgtagcccttcctttcattcttatttttcttcttcctaaattcaaaaatggtggaaataacagattgccaccaggtcctataggtttaccattcattggaaatttgcatcaatacgatagtataactcctcatatctatttttggaaactttcaaaaaaatatggcaaaatcttctcattaaaacttgcttctactaatgtggtagtagtttcttcagcaaaattagcaaaagaagtattgaaaaaacaagatttaatattttgtagtagaccatctattcttggccaacaaaaactgtcttattatggtcgtgatattgcttttaatgattattggagagaaatgagaaaaatttgtgttcttcatctttttagtttaaaaaaagttcaattatttagtccaattcgtgaagatgaagtttttagaatgattaagaaaatatcaaaacaagcttctacttcacaaattattaatctgagtaatttaatgatttcattaacaagtacaattatttgtagagttgcttttggtgttaggattgaagaagaagcacatgcaaggaagagatttgattttcttttggccgaggcacaagaaatgatggctagtttctttgtatctgatttttttccctttttaagttggattgataaattaagtggattgacatatagacttgagaggaatttcaaggatttggataatttttatgaagaactcattgagcaacatcaaaatcctaataagccaaaatatatggaaggagatattgttgatcttttgctacaattgaagaaagagaaattaacaccacttgatctcactatggaagatataaaaggaattctcatgaatgtgttagttgcaggatcagacactagtgcagctgctactgtttgggcaatgacagccttgataaagaatcctaaagccatggaaaaagttcaattagaaatcagaaaatcagttgggaagaaaggcattgtaaatgaagaagatgtccaaaacatcccttattttaaagcagtgataaaggaaatatttagattgtatccaccagctccacttttagttccaagagaatcaatggaaaaaaccatattagaaggttatgaaattcggccaagaaccatagttcatgttaacgcttgggctatagcaagggatcctgaaatatgggaaaatccagatgaatttatacctgagagatttttgaatagcagtatcgattacaagggtcaagattttgggttacttccatttggtgcaggcagaagaggttgcccaggtattgcacttggggttgcatccatggaacttgctttgtcaaatcttctttatgcatttgattgggagttgccttatggagtgaaaaaagaagacatcgacacaaacgttaggcctggaattgccatgcacaagaaaaacgaactttgccttgtcccaaaaaattatttataaattatattgggacgtggatctcatgctagttctgtgaagg

SEQ ID NO: 367 - protein, 491 aa, Nicotiana tabacum
LFLLFVALPFILIFLLPKFKNGGNNRLPPGPIGLPFIGNLHQYDSITPHIYFWKLSKKYGKIFSLKLASTNVVVVSSAKLAKEVLKKQDLIFCSRPSILGQQKLSYYGRDIAFNDYWREMRKICVLHLFSLKKVQLFSPIREDEVFRMIKKISKQASTSQIINLSNLMISLTSTIICRVAFGVRIEEEAHARKRFDFLLAEAQEMMASFFVSDFFPFLSWIDKLSGLTYRLERNFKDLDNFYEELIEQHQNPNKPKYMEGDIVDLLLQLKKEKLTPLDLTMEDIKGILMNVLVAGSDTSAAATVWAMTALIKNPKAMEKVQLEIRKSVGKKGIVNEEDVQNIPYFKAVIKEIFRLYPPAPLLVPRESMEKTILEGYEIRPRTIVHVNAWAIARDPEIWENPDEFIPERFLNSSIDYKGQDFGLLPFGAGRRGCPGIALGVASMELALSNLLYAFDWELPYGVKKEDIDTNVRPGIAMHKKNELCLVPKNYL

SEQ ID NO: 368 - DNA, 987 bp, Nicotiana tabacum
ctcattatccatcacctaaaatggagaattcttgggtttttctagccttggcagggctatctgcattagcttttctctgtaaaataatcacctgtcgaagaccggttaaccggaaaataccaccaggtccaaaaccatggcccatcattggcaatttgaacctacttggtcctataccacatcaatcttttgacttgctttccaaaaaatatggagagttgatgctgctgaaatttggctccaggccagttcttgttgcttcatctgctgaaatggcaaaacagtttttaaaagtacatgatgctaatttcgcctcccgtcctatgctagctggtggaaagtatacaagctataactattgtgacatgacatgggcaccctatggtccctattggcgccaagcacgacgaatttaccttaaccagatatttactccgaaaaggctagactcgttcgagtacattcgtgttgaagaaaggcaggccttgatttcccagctgaattcccttgctggaaagccattttttctcaaagaccatttgtcgcgatttagcctctgcagcatgacaaggatggttttgagcaacaagtattttggtgaatcaacagttagagtagaagatttgcagtacctggtagatcaatggttcttacttaatggtgctttcaacattggagattggattccatggctcagcttcttggacctacaaggctatgtgaaacaaatgaaggctttgaaaagaacttttgataagttccacaacattgtgctagatgatcacagggctaagaagaatgcagagaagaactttgtcccaaaagacatggttgatgtcttgttgaagatggctgaagatcctaatctggaagtcaaactcactaatgactgtgtcaaagggttaatgcaggatttactaactggaggaacagatagcttaacagcagcagtgcaatgggcatttcaagaacttcttagacagccaa

SEQ ID NO: 369 - protein, 322 aa, Nicotiana tabacum
MENSWVFLALAGLSALAFLCKIITCRRPVNRKIPPGPKPWPIIGNLNLLGPIPHQSFDLLSKKYGELMLLKFGSRPVLVASSAEMAKQFLKVHDANFASRPMLAGGKYTSYNYCDMTWAPYGPYWRQARRIYLNQIFTPKRLDSFEYIRVEERQALISQLNSLAGKPFFLKDHLSRFSLCSMTRMVLSNKYFGESTVRVEDLQYLVDQWFLLNGAFNIGDWIPWLSFLDLQGYVKQMKALKRTFDKFHNIVLDDHRAKKNAEKNFVPKDMVDVLLKMAEDPNLEVKLTNDCVKGLMQDLLTGGTDSLTAAVQWAFQELLRQP

SEQ ID NO: 370 - DNA, 980 bp, Nicotiana tabacum
atgatcgctgggaaaaattatggatccggtaaaggagatgaacaagtggagagatttgggaaagcgtttaaggattttataattttatcaatggagtttgtgttatgggatgcttttccaattccattgttcaaatgggtggatcttcaaggccatgttaaggccatgaaaaggacatttaaggatatagattctgtttttcagaattggttagaggaacatgtcaagaaaaaagaaaaaatggaggttaatgcagaaggaaatgaacaagatttcattgatgtggtgctttcaaaaatgagtaatgaatatcttgatgaaggctactctcgtgatactgtcataaaagcaacagtgtttagtttagtcttggatgctgcggacacagttgctcttcacatgaattggggaatggcattattgacaaacaatcaacatgccttgaagaaagcgcaagaagagatagataaaaaagttggtaaggatagatgggtagaagagagtgatattaaggatttggtatacctccaaactattgttaaagaagtgttacgattatatccaccgggacctttattagtaccccatgaaaatgtagaggattgtgttgttagtggatatcacattcctaaagggactagactattcgcgaacgttatgaaattacagcgcgatcctaaactctggtcaaatcctgataagttcgatccagagagatttttcgctgctgatattgactttcgtggtcaacactatgagtttatcccatttggttctggaagacgatcttgtccggggatgacttatgcaatgcaagtggaacacctaacaatcgcacacttgatccagggtttcaattacaaaactccaaatgacgagcccttggatatgaaggaaggtgcaggattaactatacgtaaggtaaatcctatagaagtggtaattacgcctcgcctgacacctgagctttattaaaatct

SEQ ID NO: 371 - protein, 324 aa, Nicotiana tabacum
MIAGKNYGSGKGDEQVERFGKAFKDFIILSMEFVLWDAFPIPLFKWVDLQGHVKAMKRTFKDIDSVFQNWLEEHVKKKEKMEVNAEGNEQDFIDVVLSKMSNEYLDEGYSRDTVIKATVFSLVLDAADTVALHMNWGMALLTNNQHALKKAQEEIDKKVGKDRWVEESDIKDLVYLQTIVKEVLRLYPPGPLLVPHENVEDCVVSGYHIPKGTRLFANVMKLQRDPKLWSNPDKFDPERFFAADIDFRGQHYEFIPFGSGRRSCPGMTYAMQVEHLTIAHLIQGFNYKTPNDEPLDMKEGAGLTIRKVNPIEVVITPRLTPELY

SEQ ID NO: 372 - DNA, 513 bp, Nicotiana tabacum
gcagtgatcttagaaggtcttaggcgacacccgcccggtcactttgtgctgccacatacggtgacagaggaagcagaactgaacggctacgtcgtcccaaagaatgccaccatcaatttcatggttgccgacatgggtttggacccaaaggtgtgggaggatcccttggaatttaagccagagaggttcttaatggagggatcagataaggaagggtttgatataacaggaagtagagagatcaagatgatgccatttggagctggtaggagaatatgtcctggctatgctttggctatgcttcatttggaatactttgtggctaatttggtttggcattttcgatgggatgctgtggagggagatgatgttgatctttcagagaagctagaattcaccgttgtgatgaagaatcctctacgagctcgtatctgccctagagttaactctgtttgaatttggtaattactagtagttctttctatttgcattgttccctgttgatggacttcc

SEQ ID NO: 373 - protein, 151 aa, Nicotiana tabacum
AVILEGLRRHPPGHFVLPHTVTEEAELNGYVVPKNATINFMVADMGLDPKVWEDPLEFKPERFLMEGSDKEGFDITGSREIKMMPFGAGRRICPGYALAMLHLEYFVANLVWHFRWDAVEGDDVDLSEKLEFTVVMKNPLRARICPRVNSV

SEQ ID NO: 374 - DNA, 419 bp, Nicotiana tabacum
ttcgcatggataggcccagaacccaggattttcgtaatgaaaccagaattgataaaggaaatagtaacgaacaacaccatcttcaaaaaaccaaaaccagccccacttgtccagcttcttgttagtggcatctcaagttatgaggacgacaaatgggctaagcacagaaaaattcttaacactgcattttacgccgagaagttgaagtgtatgctgccggcaatgcacacaagctgtgaagatatgatcaacaagtgggaaattctactctccgaaaacaaatcctgcgaattggacgtgcatccatattttgaagattttaccagtgatgtgatttcaagaacagcatttggaagtagttatgcagaaggaacaagaatatttcatcttcaaaaagaactagctgaactcacacgcca

SEQ ID NO: 375 - protein, 139 aa, Nicotiana tabacum
FAWIGPEPRIFVMKPELIKEIVTNNTIFKKPKPAPLVQLLVSGISSYEDDKWAKHRKILNTAFYAEKLKCMLPAMHTSCEDMINKWEILLSENKSCELDVHPYFEDFTSDVISRTAFGSSYAEGTRIFHLQKELAELTR

SEQ ID NO: 376 - DNA, 557 bp, Nicotiana tabacum
atgagtttagtaaaatcagtagtgtatgaagtattaagaattgaacctccagttccattccaatatggtaaagccaaagaagatatcataatccaaagccatgattcaactttcttagtcaagaaaggtgaaatgatctttggatatcagccttttgctacaaaagatccaaagatttttgacaaaccagaggagtttattccggagaggttcatggccgaaggggaaaaattattaaagtatgtgtattggtcaaatgcaagagagacagatgatccaacggtggacgacaaacaatgcccagcgaaaaatcttgtcgtgcttttgtgcaggttgatgttggtggaggttttcatgcgttacgacacattcacagtggagtcaacaaagctctttcttgggtcatcagtaacgttcacgactctggaaaaagcgacatgagtttcagatatcttaattgtaggctgcaaataataatgtggtcattctgcaaattattgtacttgtgctgatgtacttgacttcgagtggatataataatgcactgtttttagaaa

SEQ ID NO: 377 - protein, 146 aa, Nicotiana tabacum
MSLVKSVVYEVLRIEPPVPFQYGKAKEDIIIQSHDSTFLVKKGEMIFGYQPFATKDPKIFDKPEEFIPERFMAEGEKLLKYVYWSNARETDDPTVDDKQCPAKNLVVLLCRLMLVEVFMRYDTFTVESTKLFLGSSVTFTTLEKAT

SEQ ID NO: 378 - DNA, 389 bp, Nicotiana tabacum
gttggaacaagtagttggcacaaacagaatggtggaagaatcagatttggaaaaattagattacttagatatggttgtaaaagaaggttttaggcttcaccctgttgcaccactattacttcctcgtgaatccattgaagattgtattgttgatggttttgatatacctaaaggttcaagaattttagtaaatacttgggcaattggaagagatccagaagcctggcccgaacccgagaagttcaagccagaaaggtttgttggtagcaacatcgatcttaggggacgtgattttcaacttttaccatttggctcagggagaaggagttgccccggattacaattagggctcaccattgttcgcttggtgttagcgcaattggttcatt

SEQ ID NO: 379 - protein, 129 aa, Nicotiana tabacum
LEQVVGTNRMVEESDLEKLDYLDMVVKEGFRLHPVAPLLLPRESIEDCIVDGFDIPKGSRILVNTWAIGRDPEAWPEPEKFKPERFVGSNIDLRGRDFQLLPFGSGRRSCPGLQLGLTIVRLVLAQLVH

SEQ ID NO: 380 - DNA, 405 bp, Nicotiana tabacum
ctatatggagacacaaaggagatggctgagatgaccaaagaagccaagtttaaacccattaaactcactgatgatattctccctcggatcttccctttctaccatcatactttcaacaaatatggtaaccattgtttcgcatggataggcccagaacccaggattttcgtaatgaaaccagaattgataaaggaaatagtaacgaacaacaccatcttcaaaaaaccaaaaccagccccacttgtccagcttcttgttagtggcatctcaagttatgaggacgacaaatgggctaagcacggaaaaattcttaacactgcattttacgccgagaagttgaagtgtatgctgccggcaatgcacacaagctgtgaagatatgatcaacaagtgggaaattctactc

SEQ ID NO: 381 - protein, 135 aa, Nicotiana tabacum
LYGDTKEMAEMTKEAKFKPIKLTDDILPRIFPFYHHTFNKYGNHCFAWIGPEPRIFVMKPELIKEIVTNNTIFKKPKPAPLVQLLVSGISSYEDDKWAKHGKILNTAFYAEKLKCMLPAMHTSCEDMINKWEILL

SEQ ID NO: 382 - DNA, 445 bp, Nicotiana tabacum
tacgtacgttacatttacccatgcagtaacggagccaacaacattgggtgggtatgacatacccacatatgctaatgtagagttttttgtacccgggatctcggatgacccgaaagtttggtctgatccggaaaagtttgacccggataggtttctatccgggcgggaggacgctgatataacgggtgtgaccggggtaaagatgatgccatttggggtcgggcggaggatttgtccgggcttgggcttggcaacggtgcatgtgaatttgatgttggcccgaatgattcaagaatttgaatggtccgcttacccggaaaataggaaagtggattttactgagaaattggaatttactgtggtgatgaaaaatcctttaagagctaaggtcaagccaagaatgcaagtggtgtaattcattaagattataagtccaaaaataagc

SEQ ID NO: 383 - protein, 137 aa, Nicotiana tabacum
TYVTFTHAVTEPTTLGGYDIPTYANVEFFVPGISDDPKVWSDPEKFDPDRFLSGREDADITGVTGVKMMPFGVGRRICPGLGLATVHVNLMLARMIQEFEWSAYPENRKVDFTEKLEFTVVMKNPLRAKVKPRMQVV

SEQ ID NO: 384 - DNA, 574 bp, Nicotiana tabacum
agaagagatagacatgaaagtgggtaaagagaggtggattgaagatactgacataaaaaatttagtgtaccttcaggctatcgttaaagagacattgcgcttgtatccacctgttccttttcttttaccacacgaagcagtgcaagattgtaaagtgactggttaccacattcctaaaggtactcgtctatatatcaatgcgtggaaagtacatcgcgatcctgaaatttggtcagagcccgaaaagtttatgcccaatagattcttgactagcaaagcaaatatagatgctcgcggtcaaaattttgaatttataccgtttggttctgggagacggtcatgtccagggataggttttgcgactttagtgacacatctgacttttggtcgcttgcttcaaggttttgattttagtaagccatcaaacacgccaattgacatgacagaaggcgtaggcgttactttgcctaaggttaatcaagttgaagttctaattatccctcgtttaccttctaagctttatttattttgaaagtgcaaatcatcaatcatgggttgagtaattagtgatact

SEQ ID NO: 385 - protein, 176 aa, Nicotiana tabacum
EEIDMKVGKERWIEDTDIKNLVYLQAIVKETLRLYPPVPFLLPHEAVQDCKVTGYHIPKGTRLYINAWKVHRDPEIWSEPEKFMPNRFLTSKANIDARGQNFEFIPFGSGRRSCPGIGFATLVTHLTFGRLLQGFDFSKPSNTPIDMTEGVGVTLPKVNQVEVLIIPRLPSKLYLF

SEQ ID NO: 386 - DNA, 1137 bp, Nicotiana tabacum
aacatttggcaatatagtcttcctcctcagttcttgcctcctgttccttagaaataatggattatcatatttctttccatcttccaactctttttgggctttttgcctttgtgttcttgtctattatcttatggagaagaacactcaattcaagaagattagcccctgaaatcccaggggcatggcctattataggccatcttcgtcagctgagtggtactgataagaatatcccatttccccgaatattgggcgctttggcagataaatatggacctgtcttcacactgagaatagggatgtacccctatttgattgtcaacaattgggaagcagctaaggattgtctcacaacgcatgataaggacttcgctgcccgaccaacttctatggctggtgaaagcatcgggtacaagtatgcgaggtttacttatgctaattttggtccttattataaccaagtgcgcaaactagccctacaacatgtactctcgagtactaaactcgagaaaatgaaacacatacgtgtttctgaattggaaactagcatcaaagaattatattctttgacgctgggcaaaaacaacatgcaaaaagtgaatataagtaaatggtttgaacaattgactttaaacataatcgtgaagacaatttgtggcaagagatatagcaacatagaggaggatgaagaggcacaacgtttcagaaaggcatttaagggcatcatgtttgttgtagggcaaattgttttatatgacgcaattccattcccattgttcaaatactttgatttccaaggtcatatacaattgatgaacaaaatttataaagacttagattctattcttcaaggatggttggatgatcatatgatgaacaaggatgtaaacaataaggatcaagatgccatagatgccatgcttaaggtaacacaacttaatgaattcaaagcctatggtttttctcaggccactgtgatcaagtcgacagtcttgagtttgatcttagatggaaatgacacaaccgctgttcatttgatatgggtaatgtccttattactgaacaatccacatgttatgaaacaaggccaagaagagatagacatgaaagtgggtaaagagaggtggattgaagata

SEQ ID NO: 387 - protein, 360 aa, Nicotiana tabacum
MDYHISFHLPTLFGLFAFVFLSIILWRRTLNSRRLAPEIPGAWPIIGHLRQLSGTDKNIPFPRILGALADKYGPVFTLRIGMYPYLIVNNWEAAKDCLTTHDKDFAARPTSMAGESIGYKYARFTYANFGPYYNQVRKLALQHVLSSTKLEKMKHIRVSELETSIKELYSLTLGKNNMQKVNISKWFEQLTLNIIVKTICGKRYSNIEEDEEAQRFRKAFKGIMFVVGQIVLYDAIPFPLFKYFDFQGHIQLMNKIYKDLDSILQGWLDDHMMNKDVNNKDQDAIDAMLKVTQLNEFKAYGFSQATVIKSTVLSLILDGNDTTAVHLIWVMSLLLNNPHVMKQGQEEIDMKVGKERWIED

SEQ ID NO: 388 - DNA, 254 bp, Nicotiana tabacum
gtaaatgaagaagatgtccaaaacatcccttattttaaagcagtgataaaggaaatatttagattgtatccaccagctccacttttagttccaagagaatcaatggaaaaaaccatattagaaggttatgaaattcggccaagagccatagttcatgttaacgcttgggctatagcaagggatcctgaaatatgggaaaatccagatgaatttatacctgagagatttttgaatagcagtatcgattacagggt

SEQ ID NO: 389 - protein, 84 aa, Nicotiana tabacum
VNEEDVQNIPYFKAVIKEIFRLYPPAPLLVPRESMEKTILEGYEIRPRAIVHVNAWAIARDPEIWENPDEFIPERFLNSSIDYR

SEQ ID NO: 390 - DNA, 519 bp, Nicotiana tabacum
aagagtaatggtgcattaggaggtgaagatctaattgatgtcctactaagacttaagaatgatacaagtcttcaatttcccatcaccaacaacaatatcaaagctgttattgttgacatgtttgctgccggaacggaaacttcatcaacaacaactgtatgggctatggctgaaatgatgaagaatccaagtgtattcaccaaagctcaagcagaagtgcgagaagcctttagggacaaagtatcttttgatgaaaacgatgtggaggagctgaaatacttaaagttagtcattaaagaaactttgagacttcatccaccctctccacttttggtcccaagagaatgcagggaagacacagatataaacggctacactattcctgcgaagaccaaagttatggttaatgtttgggcattgggaagagatccaaaatattgggatgacgccgaaagctttaagccagagagatttgagcaatgctctatggatttttttggtaataattttgagtttctt

SEQ ID NO: 391 - protein, 174 aa, Nicotiana tabacum
KSNGALGGEDLIDVLLRLKNDTSLQFPITNNNIKAVIVDMFAAGTETSSTTTVWAMAEMMKNPSVFTKAQAEVREAFRDKVSFDENDVEELKYLKLVIKETLRLHPPSPLLVPRECREDTDINGYTIPAKTKVMVNVWALGRDPKYWDDAESFKPERFEQCSMDFFGNNFEFLP

SEQ ID NO: 392 - DNA, 340 bp, Nicotiana tabacum
ttaaaccaccctgaaactctgaagaaagcacaagctgaaattgatgaacatataggacatgaacgtttagtggacgagtcggacatcaacaacctaccttacctacgttgtataatcaacgagacattccgaatgtaccctgcaggaccactactagtcccacacgagtcgtcagaggaaaccaccgtaggaggctaccgtgtacccggaggaaccatgttacttgtgaatttgtgggctattcacaatgatccaaagctatgggatgaaccaagaaagtttaagccagaaagatttgaaggactagaaggtgttagagatggttacaaaatgatgccct

SEQ ID NO: 393 - protein, 113 aa, Nicotiana tabacum
LNHPETLKKAQAEIDEHIGHERLVDESDINNLPYLRCIINETFRMYPAGPLLVPHESSEETTVGGYRVPGGTMLLVNLWAIHNDPKLWDEPRKFKPERFEGLEGVRDGYKMMP

SEQ ID NO: 394 - DNA, 218 bp, Nicotiana tabacum
gtcaggtttcatcctatagctccagtattagcacctagagaatcaagggaagagtgtgagattaatggctatgttataccaaaaggcacaatggcccttgtgaatttttgggcaatttctagggatccaaattattggtcaaatcctgaaacatttgatccagagagatttaatgaaagtcaccttgattttactggagctcatttcgagtttacgcc

SEQ ID NO: 395 - protein, 72 aa, Nicotiana tabacum
VRFHPIAPVLAPRESREECEINGYVIPKGTMALVNFWAISRDPNYWSNPETFDPERFNESHLDFTGAHFEFT

SEQ ID NO: 396 - DNA, 369 bp, Nicotiana tabacum
gttatttgggcattagcagaaatgataaagaatccaagtgtaatggcgaaagcacaagcagaagtgagagaagcttttaaaggaaagaaaacatgtgatgaggatactgatcttgaaaagcttagttacctaaatttagtgatcaaagagacactccgattacaccctccaactcctctacttgtcccgcgagaatgcagggaggaaacagagattgaaggattcactataccgttgaaaagcaaagtcttggttaacgtatgggcaattggaagagatcccgagaattggggaaatcctgaatgttttataccagagagattcgaaaatagttctattgagtttactggaaatcattttcaacttctt

SEQ ID NO: 397 - protein, 123 aa, Nicotiana tabacum
VIWALAEMIKNPSVMAKAQAEVREAFKGKKTCDEDTDLEKLSYLNLVIKETLRLHPPTPLLVPRECREETEIEGFTIPLKSKVLVNVWAIGRDPENWGNPECFIPERFENSSIEFTGNHFQLL

SEQ ID NO: 398 - DNA, 462 bp, Nicotiana tabacum
gaatatcttggtgaaggttactctcgtgatactgtcattaaagcaacggtgtttagtttggtcttggatgcagcagacacagttgctcttcacataaattggggaatggcattattgataaacaatcaaaaggccttgacgaaagcacaagaagagatagacacaaaagttggtaaggacagatgggtagaagagagtgatattaaggatttggtatacctccaagctattgttaaagaagtgttacgattatatccaccaggacctttgttagtaccacacgaaaatgtagaagattgtgttgttagtggatatcacattcctaaagggacaagattattcgcaaacgtcatgaaactgcaacgtgatcctaaactctggtctgatcctgatactttcgatccagagagattcattgctactgatattgactttcgtggtcagtactataagtatatcccc

SEQ ID NO: 399 - protein, 93 aa, Nicotiana tabacum
RWVEESDIKDLVYLQAIVKEVLRLYPPGPLLVPHENVEDCVVSGYHIPKGTRLFANVMKLQRDPKLWSDPDTFDPERFIATDIDFRGQYYKYI

SEQ ID NO: 400 - DNA, 417 bp, Nicotiana tabacum
cttatggtggatttattcattgctggaagtgacacatctgctataacaacagaatgggcaatggcagaacttcttcgaaaacctcaagtacttaacaaagtaagagaagaaatacttcaacaaataggcacagaaagaccagtgaaagaatcagacattgagaaacttccataccttcaagcagttgtaaaagaagcaatgagacttcatccggcagtttcattactcttgccacacaaagcccaaaatgatatacaagtgttgggctacactgtgcctaagaacactcaagttctcgtgaatgcttgggcaattggaagagatccaaaatcctgggataagccactggagtttatgcctgaaagattcataaagtctagtgtggattacaaaggtagggactttgagtttataccc

SEQ ID NO: 401 - protein, 139 aa, Nicotiana tabacum
LMVDLFIAGSDTSAITTEWAMAELLRKPQVLNKVREEILQQIGTERPVKESDIEKLPYLQAVVKEAMRLHPAVSLLLPHKAQNDIQVLGYTVPKNTQVLVNAWAIGRDPKSWDKPLEFMPERFIKSSVDYKGRDFEFIP

SEQ ID NO: 402 - DNA, 501 bp, Nicotiana tabacum
cacatgaaaatgtaaaggattgtgttgttagtggatatcacattcctaaagggactagattattcgcaaacgtcatgaaactgcagcgcgatcctaaactcttgtcaaatcctgataagttcgatccagagagattcatcgctggtgatattgacttccgtggtcaccactatgagtttatcccatttggttctggaagacgatcttgtccggggatgacttatgcattgcaagtggaacacctaacaatggcacatttaatccagggtttcaattacaaaactccaaatgacgaggccttggatatgaaggaaggtgcaggcataacaatacgtaaggtaaatccagtggaattgataataacgcctcgcttggtacctgagctttactaaaacctaagatctttcatcttggttgatcattggttaatactcctagatgggtattcatttaccttttttcaattaattgcatgtccagcttttttaatttggtatattt

SEQ ID NO: 403 - protein, 129 aa, Nicotiana tabacum
HENVKDCVVSGYHIPKGTRLFANVMKLQRDPKLLSNPDKFDPERFIAGDIDFRGHHYEFIPFGSGRRSCPGMTYALQVEHLTMAHLIQGFNYKTPNDEALDMKEGAGITIRKVNPVELIITPRLVPELY

SEQ ID NO: 404 - DNA, 304 bp, Nicotiana tabacum
tataagtatatcccgtttggttctggaagacgatcttgtccagggatgacttatgcattgcaagtggaacacttaacaatggcacatttgatccaaggtttcaattacagaactccaaatgacgagcccttgggtatgaaggaaggtgcaggcataactatacgtaaggtaaatcctgtggaactgataatagcgcctcgcctggcacctgagctttattaaaacctaagatctttcatcttggttgatcattgtataatactcctaaatggatattcatttaccttttatcaattaattgtca

SEQ ID NO: 405 - protein, 73 aa, Nicotiana tabacum
YKYIPFGSGRRSCPGMTYALQVEHLTMAHLIQGFNYRTPNDEPLGMKEGAGITIRKVNPVELIIAPRLAPELY

SEQ ID NO: 406 - DNA, 403 bp, Nicotiana tabacum
ttttaaagatatagattctgtttttcagaattggttagaggaacgtattaataaaagagaaaaaatggaggttaatgcagaagggaatgaacaagatttcattgatgtggtgctttcaaaaatgagtaatgaatatcttggtgaaggttactctcgtgatactgttattaaagcaacggtgtttagtttggtcttggatgcagcagacacagttgctcttcacataaattggggaatggcattattgataaacaatcaaaatgccttgatgaaagcacaagaagagatagacacaaaagttggtaaggatagatgggtagaagagagtgatattaaggatttagtatacctccaagctattgttaaaaaggtgttacgattatatccaccaggacctttgtta

SEQ ID NO: 407 - protein, 134 aa, Nicotiana tabacum
FKDIDSVFQNWLEERINKREKMEVNAEGNEQDFIDVVLSKMSNEYLGEGYSRDTVIKATVFSLVLDAADTVALHINWGMALLINNQNALMKAQEEIDTKVGKDRWVEESDIKDLVYLQAIVKKVLRLYPPGPLL

SEQ ID NO: 408 - DNA, 304 bp, Nicotiana tabacum
tataagtatatcccgtttggttctggaagacgatcttgtccagggatgacttatgcattgcaagtggaacacttaacaatggcacatttgatccaaggtttcgattacagaactccaaatgacgagcccttggatatgaaggaaggtgcaggcataactatacgtaaggtaaatcctgtggaactgataatagcgcctcgcctggcacctgagctttattaaaacctaagatctttcatcttggttgatcattgtataatactcctaaatggatattcatttaccttttatcaattaattgtca

SEQ ID NO: 409 - protein, 73 aa, Nicotiana tabacum
YKYIPFGSGRRSCPGMTYALQVEHLTMAHLIQGFDYRTPNDEPLDMKEGAGITIRKVNPVELIIAPRLAPELY

SEQ ID NO: 410 - DNA, 344 bp, Nicotiana tabacum
gagattcattgctactgatattgactttcgtggtcagtactataagtatatcccgtttggttctggaaggcgatcttgtccagggatgacttatgcattgcaagtggaacacttaacaatggcacatttgatccaaggtttcaattacagaactccaaatgacgagcccttggatatgaaggaaggtgcaggcataactatacgtaatgtaaatcctgtggaactgataatagcgcctcgcctggcacctgagctttattaaaacctaagatctttcatcttggttgatcattgtataatactcctaaatggatattcatttaccttttatcaattaattgtca

SEQ ID NO: 411 - protein, 86 aa, Nicotiana tabacum
RFIATDIDFRGQYYKYIPFGSGRRSCPGMTYALQVEHLTMAHLIQGFNYRTPNDEPLDMKEGAGITIRNVNPVELIIAPRLAPELY

1. An isolated nucleic acid molecule from Nicotiana, wherein said nucleic acid molecule comprises a nucleic acid sequence selected from the group consisting of SEQ. ID. No.: 356, 358, 360, 362, 364, 366, 368, 370, 372, 434, 435, 437, 439, 441, 443, 445, 447, 449, 451, 453, 455, 457, 459, 461, 463, 465, 467, 469, 471, 473, 475, 477, 479, 481, 483, 485, 487, 489, 491, 493, 495, 497, 499, 501, 502, 503, 505, 507, 509, 511, 513, 515, 517, 519, 521, 523, 525, 527, 529, 531, 533 and 535.

2. An isolated nucleic acid molecule from Nicotiana wherein said nucleic acid molecule comprising a nucleic acid sequence selected from the group consisting of SEQ. ID. No. 297 through SEQ. ID. No. 355.

3. An isolated protein from Nicotiana, wherein said protein comprises an amino acid sequence selected from the group consisting of SEQ. ID. No.: 296, 297-355, 357, 359, 361, 363, 365, 367, 369, 371, 373, 436, 438, 440, 442, 444, 446, 448, 450, 452, 454, 456, 458, 460, 462, 464, 466, 468, 470, 472, 474, 476, 478, 480, 482, 484, 486, 488, 490, 492, 494, 496, 498, 500, 502, 504, 506, 508, 510, 512, 514, 516, 518, 520, 522, 524, 526, 528, 530, 532, 534 and 536.

4. A transgenic plant, wherein said transgenic plant comprises the nucleic acid molecule of claim 1 or 2.

5. The transgenic plant of claim 4, wherein said plant is a tobacco plant.

6. A method of producing a transgenic plant, wherein said method comprises the steps of:
(i) operably linking said nucleic acid molecule of any one of the claims 1 or 2 with a promoter functional in said plant to create a plant transformational vector;
(ii) transforming said plant with said plant transformational vector of step;
(iii) selecting a plant cell transformed with said transformation vector; and
(iv) regenerating a transformation plant from said transformed plant cell.

7. The method of claim 6, wherein said nucleic acid molecule is in an antisense orientation.

8. The method of claim 6, wherein said nucleic acid molecule is in a sense orientation.

9. The method of claim 6, wherein said nucleic acid molecule is in a RNA interference orientation.

10. The method of claim 6, wherein said nucleic acid molecule is expressed as a double stranded RNA molecule.

11. The method of claim 6, wherein said double stranded RNA molecule is about 15 to 25 nucleotides in length.

12. The method of claim 6, wherein said transgenic plant is a tobacco plant.

13. A method of selecting a plant containing a nucleic acid molecule, wherein said plant is analyzed for the presence of nucleic acid sequence selected from the group consisting of 149, 151, 153, 155, 157, 159, 161, 163, 165, 167, 169, 171, 173, 175, 177, 179, 181, 183, 185, 187, 189, 191, 193, 195, 197, 199, 201, 203, 205, 207, 209, 211, 213, 215, 217, 219, 221, 223, 225, 227, 229, 231, 233, 235, 237, 239, 241, 243, 245, 247, 249, 251, 253, 255, 257, 259, 261, 263, 265, 267, 269, 271, 273, 275, 277, 279, 281, 283, 285, 287, 289, 291, 293 and 295.

14. The method of selecting a plant of claim 13, wherein said plant is analyzed by DNA hybridization.

15. The method of selecting a plant of claim 13, wherein said DNA hybridization is Southern blot analysis.

16. The method of selecting a plant of claim 13, wherein said DNA hybridization is Northern blot analysis.

17. The method of selecting a plant of claim 13, wherein said plant is analyzed by PCR detection.

18. The method of claim 13, wherein said plant is a tobacco plant.
